United States Patent Application Publication US 2024/0309370 A1 - sequence listing, part 3

SEQ ID NO: 6772 - RNA, 21 nt, synthetic construct
  source 1..21: mol_type = other RNA
  modified_base 1: mod_base = OTHER; note = 2'-O-methyladenosine-3'-phosphorothioate
  modified_base 2: mod_base = OTHER; note = 2'-O-methylguanosine-3'-phosphorothioate
  modified_base 3: mod_base = OTHER; note = 2'-O-methyluridine-3'-phosphate
  modified_base 4: mod_base = OTHER; note = 2'-O-methylcytidine-3'-phosphate
  modified_base 5: mod_base = OTHER; note = 2'-O-methyluridine-3'-phosphate
  modified_base 6: mod_base = OTHER; note = 2'-O-methylguanosine-3'-phosphate
  modified_base 7: mod_base = OTHER; note = 2'-O-methylguanosine-3'-phosphate
  modified_base 8: mod_base = OTHER; note = 2'-O-methyluridine-3'-phosphate
  modified_base 9: mod_base = OTHER; note = 2'-fluoroguanosine-3'-phosphate
  modified_base 10: mod_base = OTHER; note = 2'-fluorouridine-3'-phosphate
  modified_base 11: mod_base = OTHER; note = 2'-fluorocytidine-3'-phosphate
  modified_base 12: mod_base = OTHER; note = 2'-O-methylcytidine-3'-phosphate
  modified_base 13: mod_base = OTHER; note = 2'-O-methyluridine-3'-phosphate
  modified_base 14: mod_base = OTHER; note = 2'-O-methylguanosine-3'-phosphate
  modified_base 15: mod_base = OTHER; note = 2'-O-methyladenosine-3'-phosphate
  modified_base 16: mod_base = OTHER; note = 2'-O-methyladenosine-3'-phosphate
  modified_base 17: mod_base = OTHER; note = 2'-O-methyladenosine-3'-phosphate
  modified_base 18: mod_base = OTHER; note = 2'-O-methylcytidine-3'-phosphate
  modified_base 19: mod_base = OTHER; note = 2'-O-methyluridine-3'-phosphate
  modified_base 20: mod_base = OTHER; note = 2'-O-methylguanosine-3'-phosphate
  modified_base 21: mod_base = OTHER; note = 2'-O-methyluridine-3'-phosphate N-[tris(GalNAc-alkyl)-amidodecanoyl)]-4-hydroxyprolinol (Hyp-(GalNAc-alkyl)3)
agtctggtgtcctgaaactgt

SEQ ID NO: 6773 - RNA, 21 nt, synthetic construct
  source 1..21: mol_type = other RNA
  modified_base 1: mod_base = OTHER; note = 2'-O-methylguanosine-3'-phosphorothioate
  modified_base 2: mod_base = OTHER; note = 2'-O-methyluridine-3'-phosphorothioate
  modified_base 3: mod_base = OTHER; note = 2'-O-methylcytidine-3'-phosphate
  modified_base 4: mod_base = OTHER; note = 2'-O-methyluridine-3'-phosphate
  modified_base 5: mod_base = OTHER; note = 2'-O-methylguanosine-3'-phosphate
  modified_base 6: mod_base = OTHER; note = 2'-O-methylguanosine-3'-phosphate
  modified_base 7: mod_base = OTHER; note = 2'-O-methyluridine-3'-phosphate
  modified_base 8: mod_base = OTHER; note = 2'-O-methylguanosine-3'-phosphate
  modified_base 9: mod_base = OTHER; note = 2'-fluorouridine-3'-phosphate
  modified_base 10: mod_base = OTHER; note = 2'-fluorocytidine-3'-phosphate
  modified_base 11: mod_base = OTHER; note = 2'-fluorocytidine-3'-phosphate
  modified_base 12: mod_base = OTHER; note = 2'-O-methyluridine-3'-phosphate
  modified_base 13: mod_base = OTHER; note = 2'-O-methylguanosine-3'-phosphate
  modified_base 14: mod_base = OTHER; note = 2'-O-methyladenosine-3'-phosphate
  modified_base 15: mod_base = OTHER; note = 2'-O-methyladenosine-3'-phosphate
  modified_base 16: mod_base = OTHER; note = 2'-O-methyladenosine-3'-phosphate
  modified_base 17: mod_base = OTHER; note = 2'-O-methylcytidine-3'-phosphate
  modified_base 18: mod_base = OTHER; note = 2'-O-methyluridine-3'-phosphate
  modified_base 19: mod_base = OTHER; note = 2'-O-methylguanosine-3'-phosphate
  modified_base 20: mod_base = OTHER; note = 2'-O-methylcytidine-3'-phosphate
  modified_base 21: mod_base = OTHER; note = 2'-O-methyluridine-3'-phosphate N-[tris(GalNAc-alkyl)-amidodecanoyl)]-4-hydroxyprolinol (Hyp-(GalNAc-alkyl)3)
gtctggtgtcctgaaactgct

SEQ ID NO: 6774 - RNA, 21 nt, synthetic construct
  source 1..21: mol_type = other RNA
  modified_base 1: mod_base = OTHER; note = 2'-O-methyluridine-3'-phosphorothioate
  modified_base 2: mod_base = OTHER; note = 2'-O-methylcytidine-3'-phosphorothioate
  modified_base 3: mod_base = OTHER; note = 2'-O-methyluridine-3'-phosphate
  modified_base 4: mod_base = OTHER; note = 2'-O-methylguanosine-3'-phosphate
  modified_base 5: mod_base = OTHER; note = 2'-O-methylguanosine-3'-phosphate
  modified_base 6: mod_base = OTHER; note = 2'-O-methyluridine-3'-phosphate
  modified_base 7: mod_base = OTHER; note = 2'-O-methylguanosine-3'-phosphate
  modified_base 8: mod_base = OTHER; note = 2'-O-methyluridine-3'-phosphate
  modified_base 9: mod_base = OTHER; note = 2'-fluorocytidine-3'-phosphate
  modified_base 10: mod_base = OTHER; note = 2'-fluorocytidine-3'-phosphate
  modified_base 11: mod_base = OTHER; note = 2'-fluorouridine-3'-phosphate
  modified_base 12: mod_base = OTHER; note = 2'-O-methylguanosine-3'-phosphate
  modified_base 13: mod_base = OTHER; note = 2'-O-methyladenosine-3'-phosphate
  modified_base 14: mod_base = OTHER; note = 2'-O-methyladenosine-3'-phosphate
  modified_base 15: mod_base = OTHER; note = 2'-O-methyladenosine-3'-phosphate
  modified_base 16: mod_base = OTHER; note = 2'-O-methylcytidine-3'-phosphate
  modified_base 17: mod_base = OTHER; note = 2'-O-methyluridine-3'-phosphate
  modified_base 18: mod_base = OTHER; note = 2'-O-methylguanosine-3'-phosphate
  modified_base 19: mod_base = OTHER; note = 2'-O-methylcytidine-3'-phosphate
  modified_base 20: mod_base = OTHER; note = 2'-O-methyladenosine-3'-phosphate
  modified_base 21: mod_base = OTHER; note = 2'-O-methyluridine-3'-phosphate N-[tris(GalNAc-alkyl)-amidodecanoyl)]-4-hydroxyprolinol (Hyp-(GalNAc-alkyl)3)
tctggtgtcctgaaactgcat

SEQ ID NO: 6775 - RNA, 21 nt, synthetic construct
  source 1..21: mol_type = other RNA
  modified_base 1: mod_base = OTHER; note = 2'-O-methylcytidine-3'-phosphorothioate
  modified_base 2: mod_base = OTHER; note = 2'-O-methyluridine-3'-phosphorothioate
  modified_base 3: mod_base = OTHER; note = 2'-O-methylguanosine-3'-phosphate
  modified_base 4: mod_base = OTHER; note = 2'-O-methylguanosine-3'-phosphate
  modified_base 5: mod_base = OTHER; note = 2'-O-methyluridine-3'-phosphate
  modified_base 6: mod_base = OTHER; note = 2'-O-methylguanosine-3'-phosphate
  modified_base 7: mod_base = OTHER; note = 2'-O-methyluridine-3'-phosphate
  modified_base 8: mod_base = OTHER; note = 2'-O-methylcytidine-3'-phosphate
  modified_base 9: mod_base = OTHER; note = 2'-fluorocytidine-3'-phosphate
  modified_base 10: mod_base = OTHER; note = 2'-fluorouridine-3'-phosphate
  modified_base 11: mod_base = OTHER; note = 2'-fluoroguanosine-3'-phosphate
  modified_base 12: mod_base = OTHER; note = 2'-O-methyladenosine-3'-phosphate
  modified_base 13: mod_base = OTHER; note = 2'-O-methyladenosine-3'-phosphate
  modified_base 14: mod_base = OTHER; note = 2'-O-methyladenosine-3'-phosphate
  modified_base 15: mod_base = OTHER; note = 2'-O-methylcytidine-3'-phosphate
  modified_base 16: mod_base = OTHER; note = 2'-O-methyluridine-3'-phosphate
  modified_base 17: mod_base = OTHER; note = 2'-O-methylguanosine-3'-phosphate
  modified_base 18: mod_base = OTHER; note = 2'-O-methylcytidine-3'-phosphate
  modified_base 19: mod_base = OTHER; note = 2'-O-methyladenosine-3'-phosphate
  modified_base 20: mod_base = OTHER; note = 2'-O-methyladenosine-3'-phosphate
  modified_base 21: mod_base = OTHER; note = 2'-O-methyluridine-3'-phosphate N-[tris(GalNAc-alkyl)-amidodecanoyl)]-4-hydroxyprolinol (Hyp-(GalNAc-alkyl)3)
ctggtgtcctgaaactgcaat

SEQ ID NO: 6776 - RNA, 21 nt, synthetic construct
  source 1..21: mol_type = other RNA
  modified_base 1: mod_base = OTHER; note = 2'-O-methyluridine-3'-phosphorothioate
  modified_base 2: mod_base = OTHER; note = 2'-O-methylguanosine-3'-phosphorothioate
  modified_base 3: mod_base = OTHER; note = 2'-O-methylguanosine-3'-phosphate
  modified_base 4: mod_base = OTHER; note = 2'-O-methyluridine-3'-phosphate
  modified_base 5: mod_base = OTHER; note = 2'-O-methylguanosine-3'-phosphate
  modified_base 6: mod_base = OTHER; note = 2'-O-methyluridine-3'-phosphate
  modified_base 7: mod_base = OTHER; note = 2'-O-methylcytidine-3'-phosphate
  modified_base 8: mod_base = OTHER; note = 2'-O-methylcytidine-3'-phosphate
  modified_base 9: mod_base = OTHER; note = 2'-fluorouridine-3'-phosphate
  modified_base 10: mod_base = OTHER; note = 2'-fluoroguanosine-3'-phosphate
  modified_base 11: mod_base = OTHER; note = 2'-fluoroadenosine-3'-phosphate
  modified_base 12: mod_base = OTHER; note = 2'-O-methyladenosine-3'-phosphate
  modified_base 13: mod_base = OTHER; note = 2'-O-methyladenosine-3'-phosphate
  modified_base 14: mod_base = OTHER; note = 2'-O-methylcytidine-3'-phosphate
  modified_base 15: mod_base = OTHER; note = 2'-O-methyluridine-3'-phosphate
  modified_base 16: mod_base = OTHER; note = 2'-O-methylguanosine-3'-phosphate
  modified_base 17: mod_base = OTHER; note = 2'-O-methylcytidine-3'-phosphate
  modified_base 18: mod_base = OTHER; note = 2'-O-methyladenosine-3'-phosphate
  modified_base 19: mod_base = OTHER; note = 2'-O-methyladenosine-3'-phosphate
  modified_base 20: mod_base = OTHER; note = 2'-O-methylcytidine-3'-phosphate
  modified_base 21: mod_base = OTHER; note = 2'-O-methyluridine-3'-phosphate N-[tris(GalNAc-alkyl)-amidodecanoyl)]-4-hydroxyprolinol (Hyp-(GalNAc-alkyl)3)
tggtgtcctgaaactgcaact

SEQ ID NO: 6777 - RNA, 21 nt, synthetic construct
  source 1..21: mol_type = other RNA
  modified_base 1: mod_base = OTHER; note = 2'-O-methylguanosine-3'-phosphorothioate
  modified_base 2: mod_base = OTHER; note = 2'-O-methylguanosine-3'-phosphorothioate
  modified_base 3: mod_base = OTHER; note = 2'-O-methyluridine-3'-phosphate
  modified_base 4: mod_base = OTHER; note = 2'-O-methylguanosine-3'-phosphate
  modified_base 5: mod_base = OTHER; note = 2'-O-methyluridine-3'-phosphate
  modified_base 6: mod_base = OTHER; note = 2'-O-methylcytidine-3'-phosphate
  modified_base 7: mod_base = OTHER; note = 2'-O-methylcytidine-3'-phosphate
  modified_base 8: mod_base = OTHER; note = 2'-O-methyluridine-3'-phosphate
  modified_base 9: mod_base = OTHER; note = 2'-fluoroguanosine-3'-phosphate
  modified_base 10: mod_base = OTHER; note = 2'-fluoroadenosine-3'-phosphate
  modified_base 11: mod_base = OTHER; note = 2'-fluoroadenosine-3'-phosphate
  modified_base 12: mod_base = OTHER; note = 2'-O-methyladenosine-3'-phosphate
  modified_base 13: mod_base = OTHER; note = 2'-O-methylcytidine-3'-phosphate
  modified_base 14: mod_base = OTHER; note = 2'-O-methyluridine-3'-phosphate
  modified_base 15: mod_base = OTHER; note = 2'-O-methylguanosine-3'-phosphate
  modified_base 16: mod_base = OTHER; note = 2'-O-methylcytidine-3'-phosphate
  modified_base 17: mod_base = OTHER; note = 2'-O-methyladenosine-3'-phosphate
  modified_base 18: mod_base = OTHER; note = 2'-O-methyladenosine-3'-phosphate
  modified_base 19: mod_base = OTHER; note = 2'-O-methylcytidine-3'-phosphate
  modified_base 20: mod_base = OTHER; note = 2'-O-methyluridine-3'-phosphate
  modified_base 21: mod_base = OTHER; note = 2'-O-methyluridine-3'-phosphate N-[tris(GalNAc-alkyl)-amidodecanoyl)]-4-hydroxyprolinol (Hyp-(GalNAc-alkyl)3)
ggtgtcctgaaactgcaactt

SEQ ID NO: 6778 - RNA, 21 nt, synthetic construct
  source 1..21: mol_type = other RNA
  modified_base 1: mod_base = OTHER; note = 2'-O-methylguanosine-3'-phosphorothioate
  modified_base 2: mod_base = OTHER; note = 2'-O-methyluridine-3'-phosphorothioate
  modified_base 3: mod_base = OTHER; note = 2'-O-methylguanosine-3'-phosphate
  modified_base 4: mod_base = OTHER; note = 2'-O-methyluridine-3'-phosphate
  modified_base 5: mod_base = OTHER; note = 2'-O-methylcytidine-3'-phosphate
  modified_base 6: mod_base = OTHER; note = 2'-O-methylcytidine-3'-phosphate
  modified_base 7: mod_base = OTHER; note = 2'-O-methyluridine-3'-phosphate
  modified_base 8: mod_base = OTHER; note = 2'-O-methylguanosine-3'-phosphate
  modified_base 9: mod_base = OTHER; note = 2'-fluoroadenosine-3'-phosphate
  modified_base 10: mod_base = OTHER; note = 2'-fluoroadenosine-3'-phosphate
  modified_base 11: mod_base = OTHER; note = 2'-fluoroadenosine-3'-phosphate
  modified_base 12: mod_base = OTHER; note = 2'-O-methylcytidine-3'-phosphate
  modified_base 13: mod_base = OTHER; note = 2'-O-methyluridine-3'-phosphate
  modified_base 14: mod_base = OTHER; note = 2'-O-methylguanosine-3'-phosphate
  modified_base 15: mod_base = OTHER; note = 2'-O-methylcytidine-3'-phosphate
  modified_base 16: mod_base = OTHER; note = 2'-O-methyladenosine-3'-phosphate
  modified_base 17: mod_base = OTHER; note = 2'-O-methyladenosine-3'-phosphate
  modified_base 18: mod_base = OTHER; note = 2'-O-methylcytidine-3'-phosphate
  modified_base 19: mod_base = OTHER; note = 2'-O-methyluridine-3'-phosphate
  modified_base 20: mod_base = OTHER; note = 2'-O-methyladenosine-3'-phosphate
  modified_base 21: mod_base = OTHER; note = 2'-O-methyluridine-3'-phosphate N-[tris(GalNAc-alkyl)-amidodecanoyl)]-4-hydroxyprolinol (Hyp-(GalNAc-alkyl)3)
gtgtcctgaaactgcaactat

SEQ ID NO: 6779 - RNA, 21 nt, synthetic construct
  source 1..21: mol_type = other RNA
  modified_base 1: mod_base = OTHER; note = 2'-O-methyluridine-3'-phosphorothioate
  modified_base 2: mod_base = OTHER; note = 2'-O-methylguanosine-3'-phosphorothioate
  modified_base 3: mod_base = OTHER; note = 2'-O-methyluridine-3'-phosphate
  modified_base 4: mod_base = OTHER; note = 2'-O-methylcytidine-3'-phosphate
  modified_base 5: mod_base = OTHER; note = 2'-O-methylcytidine-3'-phosphate
  modified_base 6: mod_base = OTHER; note = 2'-O-methyluridine-3'-phosphate
  modified_base 7: mod_base = OTHER; note = 2'-O-methylguanosine-3'-phosphate
  modified_base 8: mod_base = OTHER; note = 2'-O-methyladenosine-3'-phosphate
  modified_base 9: mod_base = OTHER; note = 2'-fluoroadenosine-3'-phosphate
  modified_base 10: mod_base = OTHER; note = 2'-fluoroadenosine-3'-phosphate
  modified_base 11: mod_base = OTHER; note = 2'-fluorocytidine-3'-phosphate
  modified_base 12: mod_base = OTHER; note = 2'-O-methyluridine-3'-phosphate
  modified_base 13: mod_base = OTHER; note = 2'-O-methylguanosine-3'-phosphate
  modified_base 14: mod_base = OTHER; note = 2'-O-methylcytidine-3'-phosphate
  modified_base 15: mod_base = OTHER; note = 2'-O-methyladenosine-3'-phosphate
  modified_base 16: mod_base = OTHER; note = 2'-O-methyladenosine-3'-phosphate
  modified_base 17: mod_base = OTHER; note = 2'-O-methylcytidine-3'-phosphate
  modified_base 18: mod_base = OTHER; note = 2'-O-methyluridine-3'-phosphate
  modified_base 19: mod_base = OTHER; note = 2'-O-methyladenosine-3'-phosphate
  modified_base 20: mod_base = OTHER; note = 2'-O-methylguanosine-3'-phosphate
  modified_base 21: mod_base = OTHER; note = 2'-O-methyluridine-3'-phosphate N-[tris(GalNAc-alkyl)-amidodecanoyl)]-4-hydroxyprolinol (Hyp-(GalNAc-alkyl)3)
tgtcctgaaactgcaactagt

SEQ ID NO: 6780 - RNA, 21 nt, synthetic construct
  source 1..21: mol_type = other RNA
  modified_base 1: mod_base = OTHER; note = 2'-O-methylguanosine-3'-phosphorothioate
  modified_base 2: mod_base = OTHER; note = 2'-O-methyluridine-3'-phosphorothioate
  modified_base 3: mod_base = OTHER; note = 2'-O-methylcytidine-3'-phosphate
  modified_base 4: mod_base = OTHER; note = 2'-O-methylcytidine-3'-phosphate
  modified_base 5: mod_base = OTHER; note = 2'-O-methyluridine-3'-phosphate
  modified_base 6: mod_base = OTHER; note = 2'-O-methylguanosine-3'-phosphate
  modified_base 7: mod_base = OTHER; note = 2'-O-methyladenosine-3'-phosphate
  modified_base 8: mod_base = OTHER; note = 2'-O-methyladenosine-3'-phosphate
  modified_base 9: mod_base = OTHER; note = 2'-fluoroadenosine-3'-phosphate
  modified_base 10: mod_base = OTHER; note = 2'-fluorocytidine-3'-phosphate
  modified_base 11: mod_base = OTHER; note = 2'-fluorouridine-3'-phosphate
  modified_base 12: mod_base = OTHER; note = 2'-O-methylguanosine-3'-phosphate
  modified_base 13: mod_base = OTHER; note = 2'-O-methylcytidine-3'-phosphate
  modified_base 14: mod_base = OTHER; note = 2'-O-methyladenosine-3'-phosphate
  modified_base 15: mod_base = OTHER; note = 2'-O-methyladenosine-3'-phosphate
  modified_base 16: mod_base = OTHER; note = 2'-O-methylcytidine-3'-phosphate
  modified_base 17: mod_base = OTHER; note = 2'-O-methyluridine-3'-phosphate
  modified_base 18: mod_base = OTHER; note = 2'-O-methyladenosine-3'-phosphate
  modified_base 19: mod_base = OTHER; note = 2'-O-methylguanosine-3'-phosphate
  modified_base 20: mod_base = OTHER; note = 2'-O-methyladenosine-3'-phosphate
  modified_base 21: mod_base = OTHER; note = 2'-O-methyluridine-3'-phosphate N-[tris(GalNAc-alkyl)-amidodecanoyl)]-4-hydroxyprolinol (Hyp-(GalNAc-alkyl)3)
gtcctgaaactgcaactagat

SEQ ID NO: 6781 - RNA, 21 nt, synthetic construct
  source 1..21: mol_type = other RNA
  modified_base 1: mod_base = OTHER; note = 2'-O-methyluridine-3'-phosphorothioate
  modified_base 2: mod_base = OTHER; note = 2'-O-methylcytidine-3'-phosphorothioate
  modified_base 3: mod_base = OTHER; note = 2'-O-methylcytidine-3'-phosphate
  modified_base 4: mod_base = OTHER; note = 2'-O-methyluridine-3'-phosphate
  modified_base 5: mod_base = OTHER; note = 2'-O-methylguanosine-3'-phosphate
  modified_base 6: mod_base = OTHER; note = 2'-O-methyladenosine-3'-phosphate
  modified_base 7: mod_base = OTHER; note = 2'-O-methyladenosine-3'-phosphate
  modified_base 8: mod_base = OTHER; note = 2'-O-methyladenosine-3'-phosphate
  modified_base 9: mod_base = OTHER; note = 2'-fluorocytidine-3'-phosphate
  modified_base 10: mod_base = OTHER; note = 2'-fluorouridine-3'-phosphate
  modified_base 11: mod_base = OTHER; note = 2'-fluoroguanosine-3'-phosphate
  modified_base 12: mod_base = OTHER; note = 2'-O-methylcytidine-3'-phosphate
  modified_base 13: mod_base = OTHER; note = 2'-O-methyladenosine-3'-phosphate
  modified_base 14: mod_base = OTHER; note = 2'-O-methyladenosine-3'-phosphate
  modified_base 15: mod_base = OTHER; note = 2'-O-methylcytidine-3'-phosphate
  modified_base 16: mod_base = OTHER; note = 2'-O-methyluridine-3'-phosphate
  modified_base 17: mod_base = OTHER; note = 2'-O-methyladenosine-3'-phosphate
  modified_base 18: mod_base = OTHER; note = 2'-O-methylguanosine-3'-phosphate
  modified_base 19: mod_base = OTHER; note = 2'-O-methyladenosine-3'-phosphate
  modified_base 20: mod_base = OTHER; note = 2'-O-methylcytidine-3'-phosphate
  modified_base 21: mod_base = OTHER; note = 2'-O-methyluridine-3'-phosphate N-[tris(GalNAc-alkyl)-amidodecanoyl)]-4-hydroxyprolinol (Hyp-(GalNAc-alkyl)3)
tcctgaaactgcaactagact

SEQ ID NO: 6782 - RNA, 21 nt, synthetic construct
  source 1..21: mol_type = other RNA
  modified_base 1: mod_base = OTHER; note = 2'-O-methylcytidine-3'-phosphorothioate
  modified_base 2: mod_base = OTHER; note = 2'-O-methylcytidine-3'-phosphorothioate
  modified_base 3: mod_base = OTHER; note = 2'-O-methyluridine-3'-phosphate
  modified_base 4: mod_base = OTHER; note = 2'-O-methylguanosine-3'-phosphate
  modified_base 5: mod_base = OTHER; note = 2'-O-methyladenosine-3'-phosphate
  modified_base 6: mod_base = OTHER; note = 2'-O-methyladenosine-3'-phosphate
  modified_base 7: mod_base = OTHER; note = 2'-O-methyladenosine-3'-phosphate
  modified_base 8: mod_base = OTHER; note = 2'-O-methylcytidine-3'-phosphate
  modified_base 9: mod_base = OTHER; note = 2'-fluorouridine-3'-phosphate
  modified_base 10: mod_base = OTHER; note = 2'-fluoroguanosine-3'-phosphate
  modified_base 11: mod_base = OTHER; note = 2'-fluorocytidine-3'-phosphate
  modified_base 12: mod_base = OTHER; note = 2'-O-methyladenosine-3'-phosphate
  modified_base 13: mod_base = OTHER; note = 2'-O-methyladenosine-3'-phosphate
  modified_base 14: mod_base = OTHER; note = 2'-O-methylcytidine-3'-phosphate
  modified_base 15: mod_base = OTHER; note = 2'-O-methyluridine-3'-phosphate
  modified_base 16: mod_base = OTHER; note = 2'-O-methyladenosine-3'-phosphate
  modified_base 17: mod_base = OTHER; note = 2'-O-methylguanosine-3'-phosphate
  modified_base 18: mod_base = OTHER; note = 2'-O-methyladenosine-3'-phosphate
  modified_base 19: mod_base = OTHER; note = 2'-O-methylcytidine-3'-phosphate
  modified_base 20: mod_base = OTHER; note = 2'-O-methyluridine-3'-phosphate
  modified_base 21: mod_base = OTHER; note = 2'-O-methyluridine-3'-phosphate N-[tris(GalNAc-alkyl)-amidodecanoyl)]-4-hydroxyprolinol (Hyp-(GalNAc-alkyl)3)
cctgaaactgcaactagactt

SEQ ID NO: 6783 - RNA, 21 nt, synthetic construct
  source 1..21: mol_type = other RNA
  modified_base 1: mod_base = OTHER; note = 2'-O-methylcytidine-3'-phosphorothioate
  modified_base 2: mod_base = OTHER; note = 2'-O-methyluridine-3'-phosphorothioate
  modified_base 3: mod_base = OTHER; note = 2'-O-methylguanosine-3'-phosphate
  modified_base 4: mod_base = OTHER; note = 2'-O-methyladenosine-3'-phosphate
  modified_base 5: mod_base = OTHER; note = 2'-O-methyladenosine-3'-phosphate
  modified_base 6: mod_base = OTHER; note = 2'-O-methyladenosine-3'-phosphate
  modified_base 7: mod_base = OTHER; note = 2'-O-methylcytidine-3'-phosphate
  modified_base 8: mod_base = OTHER; note = 2'-O-methyluridine-3'-phosphate
  modified_base 9: mod_base = OTHER; note = 2'-fluoroguanosine-3'-phosphate
  modified_base 10: mod_base = OTHER; note = 2'-fluorocytidine-3'-phosphate
  modified_base 11: mod_base = OTHER; note = 2'-fluoroadenosine-3'-phosphate
  modified_base 12: mod_base = OTHER; note = 2'-O-methyladenosine-3'-phosphate
  modified_base 13: mod_base = OTHER; note = 2'-O-methylcytidine-3'-phosphate
  modified_base 14: mod_base = OTHER; note = 2'-O-methyluridine-3'-phosphate
  modified_base 15: mod_base = OTHER; note = 2'-O-methyladenosine-3'-phosphate
  modified_base 16: mod_base = OTHER; note = 2'-O-methylguanosine-3'-phosphate
  modified_base 17: mod_base = OTHER; note = 2'-O-methyladenosine-3'-phosphate
  modified_base 18: mod_base = OTHER; note = 2'-O-methylcytidine-3'-phosphate
  modified_base 19: mod_base = OTHER; note = 2'-O-methyluridine-3'-phosphate
  modified_base 20: mod_base = OTHER; note = 2'-O-methylguanosine-3'-phosphate
  modified_base 21: mod_base = OTHER; note = 2'-O-methyluridine-3'-phosphate N-[tris(GalNAc-alkyl)-amidodecanoyl)]-4-hydroxyprolinol (Hyp-(GalNAc-alkyl)3)
ctgaaactgcaactagactgt

SEQ ID NO: 6784 - RNA, 21 nt, synthetic construct
  source 1..21: mol_type = other RNA
  modified_base 1: mod_base = OTHER; note = 2'-O-methyluridine-3'-phosphorothioate
  modified_base 2: mod_base = OTHER; note = 2'-O-methylguanosine-3'-phosphorothioate
  modified_base 3: mod_base = OTHER; note = 2'-O-methyladenosine-3'-phosphate
  modified_base 4: mod_base = OTHER; note = 2'-O-methyladenosine-3'-phosphate
  modified_base 5: mod_base = OTHER; note = 2'-O-methyladenosine-3'-phosphate
  modified_base 6: mod_base = OTHER; note = 2'-O-methylcytidine-3'-phosphate
  modified_base 7: mod_base = OTHER; note = 2'-O-methyluridine-3'-phosphate
  modified_base 8: mod_base = OTHER; note = 2'-O-methylguanosine-3'-phosphate
  modified_base 9: mod_base = OTHER; note = 2'-fluorocytidine-3'-phosphate
  modified_base 10: mod_base = OTHER; note = 2'-fluoroadenosine-3'-phosphate
  modified_base 11: mod_base = OTHER; note = 2'-fluoroadenosine-3'-phosphate
  modified_base 12: mod_base = OTHER; note = 2'-O-methylcytidine-3'-phosphate
  modified_base 13: mod_base = OTHER; note = 2'-O-methyluridine-3'-phosphate
  modified_base 14: mod_base = OTHER; note = 2'-O-methyladenosine-3'-phosphate
  modified_base 15: mod_base = OTHER; note = 2'-O-methylguanosine-3'-phosphate
  modified_base 16: mod_base = OTHER; note = 2'-O-methyladenosine-3'-phosphate
  modified_base 17: mod_base = OTHER; note = 2'-O-methylcytidine-3'-phosphate
  modified_base 18: mod_base = OTHER; note = 2'-O-methyluridine-3'-phosphate
  modified_base 19: mod_base = OTHER; note = 2'-O-methylguanosine-3'-phosphate
  modified_base 20: mod_base = OTHER; note = 2'-O-methylcytidine-3'-phosphate
  modified_base 21: mod_base = OTHER; note = 2'-O-methyluridine-3'-phosphate N-[tris(GalNAc-alkyl)-amidodecanoyl)]-4-hydroxyprolinol (Hyp-(GalNAc-alkyl)3)
tgaaactgcaactagactgct

SEQ ID NO: 6785 - RNA, 21 nt, synthetic construct
  source 1..21: mol_type = other RNA
  modified_base 1: mod_base = OTHER; note = 2'-O-methylguanosine-3'-phosphorothioate
  modified_base 2: mod_base = OTHER; note = 2'-O-methyladenosine-3'-phosphorothioate
  modified_base 3: mod_base = OTHER; note = 2'-O-methyladenosine-3'-phosphate
  modified_base 4: mod_base = OTHER; note = 2'-O-methyladenosine-3'-phosphate
  modified_base 5: mod_base = OTHER; note = 2'-O-methylcytidine-3'-phosphate
  modified_base 6: mod_base = OTHER; note = 2'-O-methyluridine-3'-phosphate
  modified_base 7: mod_base = OTHER; note = 2'-O-methylguanosine-3'-phosphate
  modified_base 8: mod_base = OTHER; note = 2'-O-methylcytidine-3'-phosphate
  modified_base 9: mod_base = OTHER; note = 2'-fluoroadenosine-3'-phosphate
  modified_base 10: mod_base = OTHER; note = 2'-fluoroadenosine-3'-phosphate
  modified_base 11: mod_base = OTHER; note = 2'-fluorocytidine-3'-phosphate
  modified_base 12: mod_base = OTHER; note = 2'-O-methyluridine-3'-phosphate
  modified_base 13: mod_base = OTHER; note = 2'-O-methyladenosine-3'-phosphate
  modified_base 14: mod_base = OTHER; note = 2'-O-methylguanosine-3'-phosphate
  modified_base 15: mod_base = OTHER; note = 2'-O-methyladenosine-3'-phosphate
  modified_base 16: mod_base = OTHER; note = 2'-O-methylcytidine-3'-phosphate
  modified_base 17: mod_base = OTHER; note = 2'-O-methyluridine-3'-phosphate
  modified_base 18: mod_base = OTHER; note = 2'-O-methylguanosine-3'-phosphate
  modified_base 19: mod_base = OTHER; note = 2'-O-methylcytidine-3'-phosphate
  modified_base 20: mod_base = OTHER; note = 2'-O-methyladenosine-3'-phosphate
  modified_base 21: mod_base = OTHER; note = 2'-O-methyluridine-3'-phosphate N-[tris(GalNAc-alkyl)-amidodecanoyl)]-4-hydroxyprolinol (Hyp-(GalNAc-alkyl)3)
gaaactgcaactagactgcat

SEQ ID NO: 6786 - RNA, 21 nt, synthetic construct
  source 1..21: mol_type = other RNA
  modified_base 1: mod_base = OTHER; note = 2'-O-methyladenosine-3'-phosphorothioate
  modified_base 2: mod_base = OTHER; note = 2'-O-methyladenosine-3'-phosphorothioate
  modified_base 3: mod_base = OTHER; note = 2'-O-methyladenosine-3'-phosphate
  modified_base 4: mod_base = OTHER; note = 2'-O-methylcytidine-3'-phosphate
  modified_base 5: mod_base = OTHER; note = 2'-O-methyluridine-3'-phosphate
  modified_base 6: mod_base = OTHER; note = 2'-O-methylguanosine-3'-phosphate
  modified_base 7: mod_base = OTHER; note = 2'-O-methylcytidine-3'-phosphate
  modified_base 8: mod_base = OTHER; note = 2'-O-methyladenosine-3'-phosphate
  modified_base 9: mod_base = OTHER; note = 2'-fluoroadenosine-3'-phosphate
  modified_base 10: mod_base = OTHER; note = 2'-fluorocytidine-3'-phosphate
  modified_base 11: mod_base = OTHER; note = 2'-fluorouridine-3'-phosphate
  modified_base 12: mod_base = OTHER; note = 2'-O-methyladenosine-3'-phosphate
  modified_base 13: mod_base = OTHER; note = 2'-O-methylguanosine-3'-phosphate
  modified_base 14: mod_base = OTHER; note = 2'-O-methyladenosine-3'-phosphate
  modified_base 15: mod_base = OTHER; note = 2'-O-methylcytidine-3'-phosphate
  modified_base 16: mod_base = OTHER; note = 2'-O-methyluridine-3'-phosphate
  modified_base 17: mod_base = OTHER; note = 2'-O-methylguanosine-3'-phosphate
  modified_base 18: mod_base = OTHER; note = 2'-O-methylcytidine-3'-phosphate
  modified_base 19: mod_base = OTHER; note = 2'-O-methyladenosine-3'-phosphate
  modified_base 20: mod_base = OTHER; note = 2'-O-methylguanosine-3'-phosphate
  modified_base 21: mod_base = OTHER; note = 2'-O-methyluridine-3'-phosphate N-[tris(GalNAc-alkyl)-amidodecanoyl)]-4-hydroxyprolinol (Hyp-(GalNAc-alkyl)3)
aaactgcaactagactgcagt

SEQ ID NO: 6787 - RNA, 21 nt, synthetic construct
  source 1..21: mol_type = other RNA
  modified_base 1: mod_base = OTHER; note = 2'-O-methyladenosine-3'-phosphorothioate
  modified_base 2: mod_base = OTHER; note = 2'-O-methyladenosine-3'-phosphorothioate
  modified_base 3: mod_base = OTHER; note = 2'-O-methylcytidine-3'-phosphate
  modified_base 4: mod_base = OTHER; note = 2'-O-methyluridine-3'-phosphate
  modified_base 5: mod_base = OTHER; note = 2'-O-methylguanosine-3'-phosphate
  modified_base 6: mod_base = OTHER; note = 2'-O-methylcytidine-3'-phosphate
  modified_base 7: mod_base = OTHER; note = 2'-O-methyladenosine-3'-phosphate
  modified_base 8: mod_base = OTHER; note = 2'-O-methyladenosine-3'-phosphate
  modified_base 9: mod_base = OTHER; note = 2'-fluorocytidine-3'-phosphate
  modified_base 10: mod_base = OTHER; note = 2'-fluorouridine-3'-phosphate
  modified_base 11: mod_base = OTHER; note = 2'-fluoroadenosine-3'-phosphate
  modified_base 12: mod_base = OTHER; note = 2'-O-methylguanosine-3'-phosphate
  modified_base 13: mod_base = OTHER; note = 2'-O-methyladenosine-3'-phosphate
  modified_base 14: mod_base = OTHER; note = 2'-O-methylcytidine-3'-phosphate
  modified_base 15: mod_base = OTHER; note = 2'-O-methyluridine-3'-phosphate
  modified_base 16: mod_base = OTHER; note = 2'-O-methylguanosine-3'-phosphate
  modified_base 17: mod_base = OTHER; note = 2'-O-methylcytidine-3'-phosphate
  modified_base 18: mod_base = OTHER; note = 2'-O-methyladenosine-3'-phosphate
  modified_base 19: mod_base = OTHER; note = 2'-O-methylguanosine-3'-phosphate
  modified_base 20: mod_base = OTHER; note = 2'-O-methyladenosine-3'-phosphate
  modified_base 21: mod_base = OTHER; note = 2'-O-methyluridine-3'-phosphate N-[tris(GalNAc-alkyl)-amidodecanoyl)]-4-hydroxyprolinol (Hyp-(GalNAc-alkyl)3)
aactgcaactagactgcagat

SEQ ID NO: 6788 - RNA, 21 nt, synthetic construct
  source 1..21: mol_type = other RNA
  modified_base 1: mod_base = OTHER; note = 2'-O-methylcytidine-3'-phosphorothioate
  modified_base 2: mod_base = OTHER; note = 2'-O-methyluridine-3'-phosphorothioate
  modified_base 3: mod_base = OTHER; note = 2'-O-methylguanosine-3'-phosphate
  modified_base 4: mod_base = OTHER; note = 2'-O-methylcytidine-3'-phosphate
  modified_base 5: mod_base = OTHER; note = 2'-O-methyladenosine-3'-phosphate
  modified_base 6: mod_base = OTHER; note = 2'-O-methyladenosine-3'-phosphate
  modified_base 7: mod_base = OTHER; note = 2'-O-methylcytidine-3'-phosphate
  modified_base 8: mod_base = OTHER; note = 2'-O-methyluridine-3'-phosphate
  modified_base 9: mod_base = OTHER; note = 2'-fluoroadenosine-3'-phosphate
  modified_base 10: mod_base = OTHER; note = 2'-fluoroguanosine-3'-phosphate
  modified_base 11: mod_base = OTHER; note = 2'-fluoroadenosine-3'-phosphate
  modified_base 12: mod_base = OTHER; note = 2'-O-methylcytidine-3'-phosphate
  modified_base 13: mod_base = OTHER; note = 2'-O-methyluridine-3'-phosphate
  modified_base 14: mod_base = OTHER; note = 2'-O-methylguanosine-3'-phosphate
  modified_base 15: mod_base = OTHER; note = 2'-O-methylcytidine-3'-phosphate
  modified_base 16: mod_base = OTHER; note = 2'-O-methyladenosine-3'-phosphate
  modified_base 17: mod_base = OTHER; note = 2'-O-methylguanosine-3'-phosphate
  modified_base 18: mod_base = OTHER; note = 2'-O-methyladenosine-3'-phosphate
  modified_base 19: mod_base = OTHER; note = 2'-O-methylcytidine-3'-phosphate
  modified_base 20: mod_base = OTHER; note = 2'-O-methylcytidine-3'-phosphate
  modified_base 21: mod_base = OTHER; note = 2'-O-methyluridine-3'-phosphate N-[tris(GalNAc-alkyl)-amidodecanoyl)]-4-hydroxyprolinol (Hyp-(GalNAc-alkyl)3)
ctgcaactagactgcagacct

SEQ ID NO: 6789 - RNA, 21 nt, synthetic construct
  source 1..21: mol_type = other RNA
  modified_base 1: mod_base = OTHER; note = 2'-O-methylguanosine-3'-phosphorothioate
  modified_base 2: mod_base = OTHER; note = 2'-O-methylguanosine-3'-phosphorothioate
  modified_base 3: mod_base = OTHER; note = 2'-O-methylcytidine-3'-phosphate
  modified_base 4: mod_base = OTHER; note = 2'-O-methyladenosine-3'-phosphate
  modified_base 5: mod_base = OTHER; note = 2'-O-methyladenosine-3'-phosphate
  modified_base 6: mod_base = OTHER; note = 2'-O-methylcytidine-3'-phosphate
  modified_base 7: mod_base = OTHER; note = 2'-O-methyladenosine-3'-phosphate
  modified_base 8: mod_base = OTHER; note = 2'-O-methylguanosine-3'-phosphate
  modified_base 9: mod_base = OTHER; note = 2'-fluorocytidine-3'-phosphate
  modified_base 10: mod_base = OTHER; note = 2'-fluoroadenosine-3'-phosphate
  modified_base 11: mod_base = OTHER; note = 2'-fluorocytidine-3'-phosphate
  modified_base 12: mod_base = OTHER; note = 2'-O-methyladenosine-3'-phosphate
  modified_base 13: mod_base = OTHER; note = 2'-O-methylguanosine-3'-phosphate
  modified_base 14: mod_base = OTHER; note = 2'-O-methyluridine-3'-phosphate
  modified_base 15: mod_base = OTHER; note = 2'-O-methyluridine-3'-phosphate
  modified_base 16: mod_base = OTHER; note = 2'-O-methyladenosine-3'-phosphate
  modified_base 17: mod_base = OTHER; note = 2'-O-methylcytidine-3'-phosphate
  modified_base 18: mod_base = OTHER; note = 2'-O-methyluridine-3'-phosphate
  modified_base 19: mod_base = OTHER; note = 2'-O-methylguanosine-3'-phosphate
  modified_base 20: mod_base = OTHER; note = 2'-O-methylguanosine-3'-phosphate
  modified_base 21: mod_base = OTHER; note = 2'-O-methyluridine-3'-phosphate N-[tris(GalNAc-alkyl)-amidodecanoyl)]-4-hydroxyprolinol (Hyp-(GalNAc-alkyl)3)
ggcaacagcacagttactggt

SEQ ID NO: 6790 - RNA, 21 nt, synthetic construct
  source 1..21: mol_type = other RNA
  modified_base 1: mod_base = OTHER; note = 2'-O-methylguanosine-3'-phosphorothioate
  modified_base 2: mod_base = OTHER; note = 2'-O-methylcytidine-3'-phosphorothioate
  modified_base 3: mod_base = OTHER; note = 2'-O-methyladenosine-3'-phosphate
  modified_base 4: mod_base = OTHER; note = 2'-O-methyladenosine-3'-phosphate
  modified_base 5: mod_base = OTHER; note = 2'-O-methylcytidine-3'-phosphate
  modified_base 6: mod_base = OTHER; note = 2'-O-methyladenosine-3'-phosphate
  modified_base 7: mod_base = OTHER; note = 2'-O-methylguanosine-3'-phosphate
  modified_base 8: mod_base = OTHER; note = 2'-O-methylcytidine-3'-phosphate
  modified_base 9: mod_base = OTHER; note = 2'-fluoroadenosine-3'-phosphate
  modified_base 10: mod_base = OTHER; note = 2'-fluorocytidine-3'-phosphate
  modified_base 11: mod_base = OTHER; note = 2'-fluoroadenosine-3'-phosphate
  modified_base 12: mod_base = OTHER; note = 2'-O-methylguanosine-3'-phosphate
  modified_base 13: mod_base = OTHER; note = 2'-O-methyluridine-3'-phosphate
  modified_base 14: mod_base = OTHER; note = 2'-O-methyluridine-3'-phosphate
  modified_base 15: mod_base = OTHER; note = 2'-O-methyladenosine-3'-phosphate
  modified_base 16: mod_base = OTHER; note = 2'-O-methylcytidine-3'-phosphate
  modified_base 17: mod_base = OTHER; note = 2'-O-methyluridine-3'-phosphate
  modified_base 18: mod_base = OTHER; note = 2'-O-methylguanosine-3'-phosphate
  modified_base 19: mod_base = OTHER; note = 2'-O-methylguanosine-3'-phosphate
  modified_base 20: mod_base = OTHER; note = 2'-O-methyladenosine-3'-phosphate
  modified_base 21: mod_base = OTHER; note = 2'-O-methyluridine-3'-phosphate N-[tris(GalNAc-alkyl)-amidodecanoyl)]-4-hydroxyprolinol (Hyp-(GalNAc-alkyl)3)
gcaacagcacagttactggat

SEQ ID NO: 6791 - RNA, 21 nt, synthetic construct
  source 1..21: mol_type = other RNA
  modified_base 1: mod_base = OTHER; note = 2'-O-methylcytidine-3'-phosphorothioate
  modified_base 2: mod_base = OTHER; note = 2'-O-methyladenosine-3'-phosphorothioate
  modified_base 3: mod_base = OTHER; note = 2'-O-methyladenosine-3'-phosphate
  modified_base 4: mod_base = OTHER; note = 2'-O-methylcytidine-3'-phosphate
  modified_base 5: mod_base = OTHER; note = 2'-O-methyladenosine-3'-phosphate
  modified_base 6: mod_base = OTHER; note = 2'-O-methylguanosine-3'-phosphate
  modified_base 7: mod_base = OTHER; note = 2'-O-methylcytidine-3'-phosphate
  modified_base 8: mod_base = OTHER; note = 2'-O-methyladenosine-3'-phosphate
  modified_base 9: mod_base = OTHER; note = 2'-fluorocytidine-3'-phosphate
  modified_base 10: mod_base = OTHER; note = 2'-fluoroadenosine-3'-phosphate
  modified_base 11: mod_base = OTHER; note = 2'-fluoroguanosine-3'-phosphate
  modified_base 12: mod_base = OTHER; note = 2'-O-methyluridine-3'-phosphate
  modified_base 13: mod_base = OTHER; note = 2'-O-methyluridine-3'-phosphate
  modified_base 14: mod_base = OTHER; note = 2'-O-methyladenosine-3'-phosphate
  modified_base 15: mod_base = OTHER; note = 2'-O-methylcytidine-3'-phosphate
  modified_base 16: mod_base = OTHER; note = 2'-O-methyluridine-3'-phosphate
  modified_base 17: mod_base = OTHER; note = 2'-O-methylguanosine-3'-phosphate
  modified_base 18: mod_base = OTHER; note = 2'-O-methylguanosine-3'-phosphate
  modified_base 19: mod_base = OTHER; note = 2'-O-methyladenosine-3'-phosphate
  modified_base 20: mod_base = OTHER; note = 2'-O-methylcytidine-3'-phosphate
  modified_base 21: mod_base = OTHER; note = 2'-O-methyluridine-3'-phosphate N-[tris(GalNAc-alkyl)-amidodecanoyl)]-4-hydroxyprolinol (Hyp-(GalNAc-alkyl)3)
caacagcacagttactggact

SEQ ID NO: 6792 - RNA, 21 nt, synthetic construct
  source 1..21: mol_type = other RNA
  modified_base 1: mod_base = OTHER; note = 2'-O-methyladenosine-3'-phosphorothioate
  modified_base 2: mod_base = OTHER; note = 2'-O-methyladenosine-3'-phosphorothioate
  modified_base 3: mod_base = OTHER; note = 2'-O-methylcytidine-3'-phosphate
  modified_base 4: mod_base = OTHER; note = 2'-O-methyladenosine-3'-phosphate
  modified_base 5: mod_base = OTHER; note = 2'-O-methylguanosine-3'-phosphate
  modified_base 6: mod_base = OTHER; note = 2'-O-methylcytidine-3'-phosphate
  modified_base 7: mod_base = OTHER; note = 2'-O-methyladenosine-3'-phosphate
  modified_base 8: mod_base = OTHER; note = 2'-O-methylcytidine-3'-phosphate
  modified_base 9: mod_base = OTHER; note = 2'-fluoroadenosine-3'-phosphate
  modified_base 10: mod_base = OTHER; note = 2'-fluoroguanosine-3'-phosphate
  modified_base 11: mod_base = OTHER; note = 2'-fluorouridine-3'-phosphate
  modified_base 12: mod_base = OTHER; note = 2'-O-methyluridine-3'-phosphate
  modified_base 13: mod_base = OTHER; note = 2'-O-methyladenosine-3'-phosphate
  modified_base 14: mod_base = OTHER; note = 2'-O-methylcytidine-3'-phosphate
  modified_base 15: mod_base = OTHER; note = 2'-O-methyluridine-3'-phosphate
  modified_base 16: mod_base = OTHER; note = 2'-O-methylguanosine-3'-phosphate
  modified_base 17: mod_base = OTHER; note = 2'-O-methylguanosine-3'-phosphate
  modified_base 18: mod_base = OTHER; note = 2'-O-methyladenosine-3'-phosphate
  modified_base 19: mod_base = OTHER; note = 2'-O-methylcytidine-3'-phosphate
  modified_base 20: mod_base = OTHER; note = 2'-O-methyladenosine-3'-phosphate
  modified_base 21: mod_base = OTHER; note = 2'-O-methyluridine-3'-phosphate N-[tris(GalNAc-alkyl)-amidodecanoyl)]-4-hydroxyprolinol (Hyp-(GalNAc-alkyl)3)
aacagcacagttactggacat

SEQ ID NO: 6793 - RNA, 21 nt, synthetic construct
  source 1..21: mol_type = other RNA
  modified_base 1: mod_base = OTHER; note = 2'-O-methyladenosine-3'-phosphorothioate
  modified_base 2: mod_base = OTHER; note = 2'-O-methylcytidine-3'-phosphorothioate
  modified_base 3: mod_base = OTHER; note = 2'-O-methyladenosine-3'-phosphate
  modified_base 4: mod_base = OTHER; note = 2'-O-methylguanosine-3'-phosphate
  modified_base 5: mod_base = OTHER; note = 2'-O-methylcytidine-3'-phosphate
  modified_base 6: mod_base = OTHER; note = 2'-O-methyladenosine-3'-phosphate
  modified_base 7: mod_base = OTHER; note = 2'-O-methylcytidine-3'-phosphate
  modified_base 8: mod_base = OTHER; note = 2'-O-methyladenosine-3'-phosphate
  modified_base 9: mod_base = OTHER; note = 2'-fluoroguanosine-3'-phosphate
  modified_base 10: mod_base = OTHER; note = 2'-fluorouridine-3'-phosphate
  modified_base 11: mod_base = OTHER; note = 2'-fluorouridine-3'-phosphate
  modified_base 12: mod_base = OTHER; note = 2'-O-methyladenosine-3'-phosphate
  modified_base 13: mod_base = OTHER; note = 2'-O-methylcytidine-3'-phosphate
  modified_base 14: mod_base = OTHER; note = 2'-O-methyluridine-3'-phosphate
  modified_base 15: mod_base = OTHER; note = 2'-O-methylguanosine-3'-phosphate
  modified_base 16: mod_base = OTHER; note = 2'-O-methylguanosine-3'-phosphate
  modified_base 17: mod_base = OTHER; note = 2'-O-methyladenosine-3'-phosphate
  modified_base 18: mod_base = OTHER; note = 2'-O-methylcytidine-3'-phosphate
  modified_base 19: mod_base = OTHER; note = 2'-O-methyladenosine-3'-phosphate
  modified_base 20: mod_base = OTHER; note = 2'-O-methyladenosine-3'-phosphate
  modified_base 21: mod_base = OTHER; note = 2'-O-methyluridine-3'-phosphate N-[tris(GalNAc-alkyl)-amidodecanoyl)]-4-hydroxyprolinol (Hyp-(GalNAc-alkyl)3)
acagcacagttactggacaat

SEQ ID NO: 6794 - RNA, 21 nt, synthetic construct
  source 1..21: mol_type = other RNA
  modified_base 1: mod_base = OTHER; note = 2'-O-methylcytidine-3'-phosphorothioate
  modified_base 2: mod_base = OTHER; note = 2'-O-methyladenosine-3'-phosphorothioate
  modified_base 3: mod_base = OTHER; note = 2'-O-methylguanosine-3'-phosphate
  modified_base 4: mod_base = OTHER; note = 2'-O-methylcytidine-3'-phosphate
  modified_base 5: mod_base = OTHER; note = 2'-O-methyladenosine-3'-phosphate
  modified_base 6: mod_base = OTHER; note = 2'-O-methylcytidine-3'-phosphate
  modified_base 7: mod_base = OTHER; note = 2'-O-methyladenosine-3'-phosphate
  modified_base 8: mod_base = OTHER; note = 2'-O-methylguanosine-3'-phosphate
  modified_base 9: mod_base = OTHER; note = 2'-fluorouridine-3'-phosphate
  modified_base 10: mod_base = OTHER; note = 2'-fluorouridine-3'-phosphate
  modified_base 11: mod_base = OTHER; note = 2'-fluoroadenosine-3'-phosphate
  modified_base 12: mod_base = OTHER; note = 2'-O-methylcytidine-3'-phosphate
  modified_base 13: mod_base = OTHER; note = 2'-O-methyluridine-3'-phosphate
  modified_base 14: mod_base = OTHER; note = 2'-O-methylguanosine-3'-phosphate
  modified_base 15: mod_base = OTHER; note = 2'-O-methylguanosine-3'-phosphate
  modified_base 16: mod_base = OTHER; note = 2'-O-methyladenosine-3'-phosphate
  modified_base 17: mod_base = OTHER; note = 2'-O-methylcytidine-3'-phosphate
  modified_base 18: mod_base = OTHER; note = 2'-O-methyladenosine-3'-phosphate
  modified_base 19: mod_base = OTHER; note = 2'-O-methyladenosine-3'-phosphate
  modified_base 20: mod_base = OTHER; note = 2'-O-methylcytidine-3'-phosphate
  modified_base 21: mod_base = OTHER; note = 2'-O-methyluridine-3'-phosphate N-[tris(GalNAc-alkyl)-amidodecanoyl)]-4-hydroxyprolinol (Hyp-(GalNAc-alkyl)3)
cagcacagttactggacaact

SEQ ID NO: 6795 - RNA, 21 nt, synthetic construct
  source 1..21: mol_type = other RNA
  modified_base 1: mod_base = OTHER; note = 2'-O-methyladenosine-3'-phosphorothioate
  modified_base 2: mod_base = OTHER; note = 2'-O-methylguanosine-3'-phosphorothioate
  modified_base 3: mod_base = OTHER; note = 2'-O-methylcytidine-3'-phosphate
  modified_base 4: mod_base = OTHER; note = 2'-O-methyladenosine-3'-phosphate
  modified_base 5: mod_base = OTHER; note = 2'-O-methylcytidine-3'-phosphate
  modified_base 6: mod_base = OTHER; note = 2'-O-methyladenosine-3'-phosphate
  modified_base 7: mod_base = OTHER; note = 2'-O-methylguanosine-3'-phosphate
  modified_base 8: mod_base = OTHER; note = 2'-O-methyluridine-3'-phosphate
  modified_base 9: mod_base = OTHER; note = 2'-fluorouridine-3'-phosphate
  modified_base 10: mod_base = OTHER; note = 2'-fluoroadenosine-3'-phosphate
  modified_base 11: mod_base = OTHER; note = 2'-fluorocytidine-3'-phosphate
  modified_base 12: mod_base = OTHER; note = 2'-O-methyluridine-3'-phosphate
  modified_base 13: mod_base = OTHER; note = 2'-O-methylguanosine-3'-phosphate
  modified_base 14: mod_base = OTHER; note = 2'-O-methylguanosine-3'-phosphate
  modified_base 15: mod_base = OTHER; note = 2'-O-methyladenosine-3'-phosphate
  modified_base 16: mod_base = OTHER; note = 2'-O-methylcytidine-3'-phosphate
  modified_base 17: mod_base = OTHER; note = 2'-O-methyladenosine-3'-phosphate
  modified_base 18: mod_base = OTHER; note = 2'-O-methyladenosine-3'-phosphate
  modified_base 19: mod_base = OTHER; note = 2'-O-methylcytidine-3'-phosphate
  modified_base 20: mod_base = OTHER; note = 2'-O-methylcytidine-3'-phosphate
  modified_base 21: mod_base = OTHER; note = 2'-O-methyluridine-3'-phosphate N-[tris(GalNAc-alkyl)-amidodecanoyl)]-4-hydroxyprolinol (Hyp-(GalNAc-alkyl)3)
agcacagttactggacaacct

SEQ ID NO: 6796 - RNA, 21 nt, synthetic construct
  source 1..21: mol_type = other RNA
  modified_base 1: mod_base = OTHER; note = 2'-O-methylcytidine-3'-phosphorothioate
  modified_base 2: mod_base = OTHER; note = 2'-O-methyluridine-3'-phosphorothioate
  modified_base 3: mod_base = OTHER; note = 2'-O-methyluridine-3'-phosphate
  modified_base 4: mod_base = OTHER; note = 2'-O-methylguanosine-3'-phosphate
  modified_base 5: mod_base = OTHER; note = 2'-O-methylguanosine-3'-phosphate
  modified_base 6: mod_base = OTHER; note = 2'-O-methyladenosine-3'-phosphate
  modified_base 7: mod_base = OTHER; note = 2'-O-methylcytidine-3'-phosphate
  modified_base 8: mod_base = OTHER; note = 2'-O-methyladenosine-3'-phosphate
  modified_base 9: mod_base = OTHER; note = 2'-fluorocytidine-3'-phosphate
  modified_base 10: mod_base = OTHER; note = 2'-fluoroadenosine-3'-phosphate
  modified_base 11: mod_base = OTHER; note = 2'-fluoroguanosine-3'-phosphate
  modified_base 12: mod_base = OTHER; note = 2'-O-methylcytidine-3'-phosphate
  modified_base 13: mod_base = OTHER; note = 2'-O-methyladenosine-3'-phosphate
  modified_base 14: mod_base = OTHER; note = 2'-O-methylguanosine-3'-phosphate
  modified_base 15: mod_base = OTHER; note = 2'-O-methylguanosine-3'-phosphate
  modified_base 16: mod_base = OTHER; note = 2'-O-methyladenosine-3'-phosphate
  modified_base 17: mod_base = OTHER; note = 2'-O-methylcytidine-3'-phosphate
  modified_base 18: mod_base = OTHER; note = 2'-O-methyladenosine-3'-phosphate
  modified_base 19: mod_base = OTHER; note = 2'-O-methylcytidine-3'-phosphate
  modified_base 20: mod_base = OTHER; note = 2'-O-methylcytidine-3'-phosphate
  modified_base 21: mod_base = OTHER; note = 2'-O-methyluridine-3'-phosphate N-[tris(GalNAc-alkyl)-amidodecanoyl)]-4-hydroxyprolinol (Hyp-(GalNAc-alkyl)3)
cttggacacagcaggacacct

SEQ ID NO: 6797 - RNA, 21 nt, synthetic construct
  source 1..21: mol_type = other RNA
  modified_base 1: mod_base = OTHER; note = 2'-O-methyluridine-3'-phosphorothioate
  modified_base 2: mod_base = OTHER; note = 2'-O-methyluridine-3'-phosphorothioate
  modified_base 3: mod_base = OTHER; note = 2'-O-methylguanosine-3'-phosphate
  modified_base 4: mod_base = OTHER; note = 2'-O-methylguanosine-3'-phosphate
  modified_base 5: mod_base = OTHER; note = 2'-O-methyladenosine-3'-phosphate
  modified_base 6: mod_base = OTHER; note = 2'-O-methylcytidine-3'-phosphate
  modified_base 7: mod_base = OTHER; note = 2'-O-methyladenosine-3'-phosphate
  modified_base 8: mod_base = OTHER; note = 2'-O-methylcytidine-3'-phosphate
  modified_base 9: mod_base = OTHER; note = 2'-fluoroadenosine-3'-phosphate
  modified_base 10: mod_base = OTHER; note = 2'-fluoroguanosine-3'-phosphate
  modified_base 11: mod_base = OTHER; note = 2'-fluorocytidine-3'-phosphate
  modified_base 12: mod_base = OTHER; note = 2'-O-methyladenosine-3'-phosphate
  modified_base 13: mod_base = OTHER; note = 2'-O-methylguanosine-3'-phosphate
  modified_base 14: mod_base = OTHER; note = 2'-O-methylguanosine-3'-phosphate
  modified_base 15: mod_base = OTHER; note = 2'-O-methyladenosine-3'-phosphate
  modified_base 16: mod_base = OTHER; note = 2'-O-methylcytidine-3'-phosphate
  modified_base 17: mod_base = OTHER; note = 2'-O-methyladenosine-3'-phosphate
  modified_base 18: mod_base = OTHER; note = 2'-O-methylcytidine-3'-phosphate
  modified_base 19: mod_base = OTHER; note = 2'-O-methylcytidine-3'-phosphate
  modified_base 20: mod_base = OTHER; note = 2'-O-methyladenosine-3'-phosphate
  modified_base 21: mod_base = OTHER; note = 2'-O-methyluridine-3'-phosphate N-[tris(GalNAc-alkyl)-amidodecanoyl)]-4-hydroxyprolinol (Hyp-(GalNAc-alkyl)3)
ttggacacagcaggacaccat

SEQ ID NO: 6798 - RNA, 21 nt, synthetic construct
  source 1..21: mol_type = other RNA
  modified_base 1: mod_base = OTHER; note = 2'-O-methyluridine-3'-phosphorothioate
  modified_base 2: mod_base = OTHER; note = 2'-O-methylguanosine-3'-phosphorothioate
  modified_base 3: mod_base = OTHER; note = 2'-O-methylguanosine-3'-phosphate
  modified_base 4: mod_base = OTHER; note = 2'-O-methyladenosine-3'-phosphate
  modified_base 5: mod_base = OTHER; note = 2'-O-methylcytidine-3'-phosphate
  modified_base 6: mod_base = OTHER; note = 2'-O-methyladenosine-3'-phosphate
  modified_base 7: mod_base = OTHER; note = 2'-O-methylcytidine-3'-phosphate
  modified_base 8: mod_base = OTHER; note = 2'-O-methyladenosine-3'-phosphate
  modified_base 9: mod_base = OTHER; note = 2'-fluoroguanosine-3'-phosphate
  modified_base 10: mod_base = OTHER; note = 2'-fluorocytidine-3'-phosphate
  modified_base 11: mod_base = OTHER; note = 2'-fluoroadenosine-3'-phosphate
  modified_base 12: mod_base = OTHER; note = 2'-O-methylguanosine-3'-phosphate
  modified_base 13: mod_base = OTHER; note = 2'-O-methylguanosine-3'-phosphate
  modified_base 14: mod_base = OTHER; note = 2'-O-methyladenosine-3'-phosphate
  modified_base 15: mod_base = OTHER; note = 2'-O-methylcytidine-3'-phosphate
  modified_base 16: mod_base = OTHER; note = 2'-O-methyladenosine-3'-phosphate
  modified_base 17: mod_base = OTHER; note = 2'-O-methylcytidine-3'-phosphate
  modified_base 18: mod_base = OTHER; note = 2'-O-methylcytidine-3'-phosphate
  modified_base 19: mod_base = OTHER; note = 2'-O-methyladenosine-3'-phosphate
  modified_base 20: mod_base = OTHER; note = 2'-O-methylguanosine-3'-phosphate
  modified_base 21: mod_base = OTHER; note = 2'-O-methyluridine-3'-phosphate N-[tris(GalNAc-alkyl)-amidodecanoyl)]-4-hydroxyprolinol (Hyp-(GalNAc-alkyl)3)
tggacacagcaggacaccagt

SEQ ID NO: 6799 - RNA, 21 nt, synthetic construct
  source 1..21: mol_type = other RNA
  modified_base 1: mod_base = OTHER; note = 2'-O-methylguanosine-3'-phosphorothioate
  modified_base 2: mod_base = OTHER; note = 2'-O-methylguanosine-3'-phosphorothioate
  modified_base 3: mod_base = OTHER; note = 2'-O-methyladenosine-3'-phosphate
  modified_base 4: mod_base = OTHER; note = 2'-O-methylcytidine-3'-phosphate
  modified_base 5: mod_base = OTHER; note = 2'-O-methyladenosine-3'-phosphate
  modified_base 6: mod_base = OTHER; note = 2'-O-methylcytidine-3'-phosphate
  modified_base 7: mod_base = OTHER; note = 2'-O-methyladenosine-3'-phosphate
  modified_base 8: mod_base = OTHER; note = 2'-O-methylguanosine-3'-phosphate
  modified_base 9: mod_base = OTHER; note = 2'-fluorocytidine-3'-phosphate
  modified_base 10: mod_base = OTHER; note = 2'-fluoroadenosine-3'-phosphate
  modified_base 11: mod_base = OTHER; note = 2'-fluoroguanosine-3'-phosphate
  modified_base 12: mod_base = OTHER; note = 2'-O-methylguanosine-3'-phosphate
  modified_base 13: mod_base = OTHER; note = 2'-O-methyladenosine-3'-phosphate
  modified_base 14: mod_base = OTHER; note = 2'-O-methylcytidine-3'-phosphate
  modified_base 15: mod_base = OTHER; note = 2'-O-methyladenosine-3'-phosphate
  modified_base 16: mod_base = OTHER; note = 2'-O-methylcytidine-3'-phosphate
  modified_base 17: mod_base = OTHER; note = 2'-O-methylcytidine-3'-phosphate
  modified_base 18: mod_base = OTHER; note = 2'-O-methyladenosine-3'-phosphate
  modified_base 19: mod_base = OTHER; note = 2'-O-methylguanosine-3'-phosphate
  modified_base 20: mod_base = OTHER; note = 2'-O-methylcytidine-3'-phosphate
  modified_base 21: mod_base = OTHER; note = 2'-O-methyluridine-3'-phosphate N-[tris(GalNAc-alkyl)-amidodecanoyl)]-4-hydroxyprolinol (Hyp-(GalNAc-alkyl)3)
ggacacagcaggacaccagct

SEQ ID NO: 6800 - RNA, 21 nt, synthetic construct
  source 1..21: mol_type = other RNA
  modified_base 1: mod_base = OTHER; note = 2'-O-methylguanosine-3'-phosphorothioate
  modified_base 2: mod_base = OTHER; note = 2'-O-methyladenosine-3'-phosphorothioate
  modified_base 3: mod_base = OTHER; note = 2'-O-methylcytidine-3'-phosphate
  modified_base 4: mod_base = OTHER; note = 2'-O-methyladenosine-3'-phosphate
  modified_base 5: mod_base = OTHER; note = 2'-O-methylcytidine-3'-phosphate
  modified_base 6: mod_base = OTHER; note = 2'-O-methyladenosine-3'-phosphate
  modified_base 7: mod_base = OTHER; note = 2'-O-methylguanosine-3'-phosphate
  modified_base 8: mod_base = OTHER; note = 2'-O-methylcytidine-3'-phosphate
  modified_base 9: mod_base = OTHER; note = 2'-fluoroadenosine-3'-phosphate
  modified_base 10: mod_base = OTHER; note = 2'-fluoroguanosine-3'-phosphate
  modified_base 11: mod_base = OTHER; note = 2'-fluoroguanosine-3'-phosphate
  modified_base 12: mod_base = OTHER; note = 2'-O-methyladenosine-3'-phosphate
  modified_base 13: mod_base = OTHER; note = 2'-O-methylcytidine-3'-phosphate
  modified_base 14: mod_base = OTHER; note = 2'-O-methyladenosine-3'-phosphate
  modified_base 15: mod_base = OTHER; note = 2'-O-methylcytidine-3'-phosphate
  modified_base 16: mod_base = OTHER; note = 2'-O-methylcytidine-3'-phosphate
  modified_base 17: mod_base = OTHER; note = 2'-O-methyladenosine-3'-phosphate
  modified_base 18: mod_base = OTHER; note = 2'-O-methylguanosine-3'-phosphate
  modified_base 19: mod_base = OTHER; note = 2'-O-methylcytidine-3'-phosphate
  modified_base 20: mod_base = OTHER; note = 2'-O-methyladenosine-3'-phosphate
  modified_base 21: mod_base = OTHER; note = 2'-O-methyluridine-3'-phosphate N-[tris(GalNAc-alkyl)-amidodecanoyl)]-4-hydroxyprolinol (Hyp-(GalNAc-alkyl)3)
gacacagcaggacaccagcat

SEQ ID NO: 6801 - RNA, 21 nt, synthetic construct
  source 1..21: mol_type = other RNA
  modified_base 1: mod_base = OTHER; note = 2'-O-methyladenosine-3'-phosphorothioate
  modified_base 2: mod_base = OTHER; note = 2'-O-methylcytidine-3'-phosphorothioate
  modified_base 3: mod_base = OTHER; note = 2'-O-methyladenosine-3'-phosphate
  modified_base 4: mod_base = OTHER; note = 2'-O-methylcytidine-3'-phosphate
  modified_base 5: mod_base = OTHER; note = 2'-O-methyladenosine-3'-phosphate
  modified_base 6: mod_base = OTHER; note = 2'-O-methylguanosine-3'-phosphate
  modified_base 7: mod_base = OTHER; note = 2'-O-methylcytidine-3'-phosphate
  modified_base 8: mod_base = OTHER; note = 2'-O-methyladenosine-3'-phosphate
  modified_base 9: mod_base = OTHER; note = 2'-fluoroguanosine-3'-phosphate
  modified_base 10: mod_base = OTHER; note = 2'-fluoroguanosine-3'-phosphate
  modified_base 11: mod_base = OTHER; note = 2'-fluoroadenosine-3'-phosphate
  modified_base 12: mod_base = OTHER; note = 2'-O-methylcytidine-3'-phosphate
  modified_base 13: mod_base = OTHER; note = 2'-O-methyladenosine-3'-phosphate
  modified_base 14: mod_base = OTHER; note = 2'-O-methylcytidine-3'-phosphate
  modified_base 15: mod_base = OTHER; note = 2'-O-methylcytidine-3'-phosphate
  modified_base 16: mod_base = OTHER; note = 2'-O-methyladenosine-3'-phosphate
  modified_base 17: mod_base = OTHER; note = 2'-O-methylguanosine-3'-phosphate
  modified_base 18: mod_base = OTHER; note = 2'-O-methylcytidine-3'-phosphate
  modified_base 19: mod_base = OTHER; note = 2'-O-methyladenosine-3'-phosphate
  modified_base 20: mod_base = OTHER; note = 2'-O-methylguanosine-3'-phosphate
  modified_base 21: mod_base = OTHER; note = 2'-O-methyluridine-3'-phosphate N-[tris(GalNAc-alkyl)-amidodecanoyl)]-4-hydroxyprolinol (Hyp-(GalNAc-alkyl)3)
acacagcaggacaccagcagt

SEQ ID NO: 6802 - RNA, 21 nt, synthetic construct
  source 1..21: mol_type = other RNA
  modified_base 1: mod_base = OTHER; note = 2'-O-methylcytidine-3'-phosphorothioate
  modified_base 2: mod_base = OTHER; note = 2'-O-methyladenosine-3'-phosphorothioate
  modified_base 3: mod_base = OTHER; note = 2'-O-methylcytidine-3'-phosphate
  modified_base 4: mod_base = OTHER; note = 2'-O-methyladenosine-3'-phosphate
  modified_base 5: mod_base = OTHER; note = 2'-O-methylguanosine-3'-phosphate
  modified_base 6: mod_base = OTHER; note = 2'-O-methylcytidine-3'-phosphate
  modified_base 7: mod_base = OTHER; note = 2'-O-methyladenosine-3'-phosphate
  modified_base 8: mod_base = OTHER; note = 2'-O-methylguanosine-3'-phosphate
  modified_base 9: mod_base = OTHER; note = 2'-fluoroguanosine-3'-phosphate
  modified_base 10: mod_base = OTHER; note = 2'-fluoroadenosine-3'-phosphate
  modified_base 11: mod_base = OTHER; note = 2'-fluorocytidine-3'-phosphate
  modified_base 12: mod_base = OTHER; note = 2'-O-methyladenosine-3'-phosphate
  modified_base 13: mod_base = OTHER; note = 2'-O-methylcytidine-3'-phosphate
  modified_base 14: mod_base = OTHER; note = 2'-O-methylcytidine-3'-phosphate
  modified_base 15: mod_base = OTHER; note = 2'-O-methyladenosine-3'-phosphate
  modified_base 16: mod_base = OTHER; note = 2'-O-methylguanosine-3'-phosphate
  modified_base 17: mod_base = OTHER; note = 2'-O-methylcytidine-3'-phosphate
  modified_base 18: mod_base = OTHER; note = 2'-O-methyladenosine-3'-phosphate
  modified_base 19: mod_base = OTHER; note = 2'-O-methylguanosine-3'-phosphate
  modified_base 20: mod_base = OTHER; note = 2'-O-methylcytidine-3'-phosphate
  modified_base 21: mod_base = OTHER; note = 2'-O-methyluridine-3'-phosphate N-[tris(GalNAc-alkyl)-amidodecanoyl)]-4-hydroxyprolinol (Hyp-(GalNAc-alkyl)3)
cacagcaggacaccagcagct

SEQ ID NO: 6803 - RNA, 21 nt, synthetic construct
  source 1..21: mol_type = other RNA
  modified_base 1: mod_base = OTHER; note = 2'-O-methylguanosine-3'-phosphorothioate
  modified_base 2: mod_base = OTHER; note = 2'-O-methylcytidine-3'-phosphorothioate
  modified_base 3: mod_base = OTHER; note = 2'-O-methyladenosine-3'-phosphate
  modified_base 4: mod_base = OTHER; note = 2'-O-methylguanosine-3'-phosphate
  modified_base 5: mod_base = OTHER; note = 2'-O-methylguanosine-3'-phosphate
  modified_base 6: mod_base = OTHER; note = 2'-O-methyladenosine-3'-phosphate
  modified_base 7: mod_base = OTHER; note = 2'-O-methylcytidine-3'-phosphate
  modified_base 8: mod_base = OTHER; note = 2'-O-methyladenosine-3'-phosphate
  modified_base 9: mod_base = OTHER; note = 2'-fluorocytidine-3'-phosphate
  modified_base 10: mod_base = OTHER; note = 2'-fluorocytidine-3'-phosphate
  modified_base 11: mod_base = OTHER; note = 2'-fluoroadenosine-3'-phosphate
  modified_base 12: mod_base = OTHER; note = 2'-O-methylguanosine-3'-phosphate
  modified_base 13: mod_base = OTHER; note = 2'-O-methylcytidine-3'-phosphate
  modified_base 14: mod_base = OTHER; note = 2'-O-methyladenosine-3'-phosphate
  modified_base 15: mod_base = OTHER; note = 2'-O-methylguanosine-3'-phosphate
  modified_base 16: mod_base = OTHER; note = 2'-O-methylcytidine-3'-phosphate
  modified_base 17: mod_base = OTHER; note = 2'-O-methylcytidine-3'-phosphate
  modified_base 18: mod_base = OTHER; note = 2'-O-methylcytidine-3'-phosphate
  modified_base 19: mod_base = OTHER; note = 2'-O-methyluridine-3'-phosphate
  modified_base 20: mod_base = OTHER; note = 2'-O-methyluridine-3'-phosphate
  modified_base 21: mod_base = OTHER; note = 2'-O-methyluridine-3'-phosphate N-[tris(GalNAc-alkyl)-amidodecanoyl)]-4-hydroxyprolinol (Hyp-(GalNAc-alkyl)3)
gcaggacaccagcagcccttt

SEQ ID NO: 6804 - RNA, 21 nt, synthetic construct
  source 1..21: mol_type = other RNA
  modified_base 1: mod_base = OTHER; note = 2'-O-methylguanosine-3'-phosphorothioate
  modified_base 2: mod_base = OTHER; note = 2'-O-methylguanosine-3'-phosphorothioate
  modified_base 3: mod_base = OTHER; note = 2'-O-methyladenosine-3'-phosphate
  modified_base 4: mod_base = OTHER; note = 2'-O-methylcytidine-3'-phosphate
  modified_base 5: mod_base = OTHER; note = 2'-O-methyladenosine-3'-phosphate
  modified_base 6: mod_base = OTHER; note = 2'-O-methylcytidine-3'-phosphate
  modified_base 7: mod_base = OTHER; note = 2'-O-methylcytidine-3'-phosphate
  modified_base 8: mod_base = OTHER; note = 2'-O-methyladenosine-3'-phosphate
  modified_base 9: mod_base = OTHER; note = 2'-fluoroguanosine-3'-phosphate
  modified_base 10: mod_base = OTHER; note = 2'-fluorocytidine-3'-phosphate
  modified_base 11: mod_base = OTHER; note = 2'-fluoroadenosine-3'-phosphate
  modified_base 12: mod_base = OTHER; note = 2'-O-methylguanosine-3'-phosphate
  modified_base 13: mod_base = OTHER; note = 2'-O-methylcytidine-3'-phosphate
  modified_base 14: mod_base = OTHER; note = 2'-O-methylcytidine-3'-phosphate
  modified_base 15: mod_base = OTHER; note = 2'-O-methylcytidine-3'-phosphate
  modified_base 16: mod_base = OTHER; note = 2'-O-methyluridine-3'-phosphate
  modified_base 17: mod_base = OTHER; note = 2'-O-methyluridine-3'-phosphate
  modified_base 18: mod_base = OTHER; note = 2'-O-methylcytidine-3'-phosphate
  modified_base 19: mod_base = OTHER; note = 2'-O-methylcytidine-3'-phosphate
  modified_base 20: mod_base = OTHER; note = 2'-O-methyluridine-3'-phosphate
  modified_base 21: mod_base = OTHER; note = 2'-O-methyluridine-3'-phosphate N-[tris(GalNAc-alkyl)-amidodecanoyl)]-4-hydroxyprolinol (Hyp-(GalNAc-alkyl)3)
ggacaccagcagcccttcctt

SEQ ID NO: 6805 - RNA, 21 nt, synthetic construct
  source 1..21: mol_type = other RNA
  modified_base 1: mod_base = OTHER; note = 2'-O-methylguanosine-3'-phosphorothioate
  modified_base 2: mod_base = OTHER; note = 2'-O-methyladenosine-3'-phosphorothioate
  modified_base 3: mod_base = OTHER; note = 2'-O-methylcytidine-3'-phosphate
  modified_base 4: mod_base = OTHER; note = 2'-O-methyladenosine-3'-phosphate
  modified_base 5: mod_base = OTHER; note = 2'-O-methylcytidine-3'-phosphate
  modified_base 6: mod_base = OTHER; note = 2'-O-methylcytidine-3'-phosphate
  modified_base 7: mod_base = OTHER; note = 2'-O-methyladenosine-3'-phosphate
  modified_base 8: mod_base = OTHER; note = 2'-O-methylguanosine-3'-phosphate
  modified_base 9: mod_base = OTHER; note = 2'-fluorocytidine-3'-phosphate
  modified_base 10: mod_base = OTHER; note = 2'-fluoroadenosine-3'-phosphate
  modified_base 11: mod_base = OTHER; note = 2'-fluoroguanosine-3'-phosphate
  modified_base 12: mod_base = OTHER; note = 2'-O-methylcytidine-3'-phosphate
  modified_base 13: mod_base = OTHER; note = 2'-O-methylcytidine-3'-phosphate
  modified_base 14: mod_base = OTHER; note = 2'-O-methylcytidine-3'-phosphate
  modified_base 15: mod_base = OTHER; note = 2'-O-methyluridine-3'-phosphate
  modified_base 16: mod_base = OTHER; note = 2'-O-methyluridine-3'-phosphate
  modified_base 17: mod_base = OTHER; note = 2'-O-methylcytidine-3'-phosphate
  modified_base 18: mod_base = OTHER; note = 2'-O-methylcytidine-3'-phosphate
  modified_base 19: mod_base = OTHER; note = 2'-O-methyluridine-3'-phosphate
  modified_base 20: mod_base = OTHER; note = 2'-O-methyladenosine-3'-phosphate
  modified_base 21: mod_base = OTHER; note = 2'-O-methyluridine-3'-phosphate N-[tris(GalNAc-alkyl)-amidodecanoyl)]-4-hydroxyprolinol (Hyp-(GalNAc-alkyl)3)
gacaccagcagcccttcctat

SEQ ID NO: 6806 - RNA, 21 nt, synthetic construct
  source 1..21: mol_type = other RNA
  modified_base 1: mod_base = OTHER; note = 2'-O-methyladenosine-3'-phosphorothioate
  modified_base 2: mod_base = OTHER; note = 2'-O-methylcytidine-3'-phosphorothioate
  modified_base 3: mod_base = OTHER; note = 2'-O-methyladenosine-3'-phosphate
  modified_base 4: mod_base = OTHER; note = 2'-O-methylcytidine-3'-phosphate
  modified_base 5: mod_base = OTHER; note = 2'-O-methylcytidine-3'-phosphate
  modified_base 6: mod_base = OTHER; note = 2'-O-methyladenosine-3'-phosphate
  modified_base 7: mod_base = OTHER; note = 2'-O-methylguanosine-3'-phosphate
  modified_base 8: mod_base = OTHER; note = 2'-O-methylcytidine-3'-phosphate
  modified_base 9: mod_base = OTHER; note = 2'-fluoroadenosine-3'-phosphate
  modified_base 10: mod_base = OTHER; note = 2'-fluoroguanosine-3'-phosphate
  modified_base 11: mod_base = OTHER; note = 2'-fluorocytidine-3'-phosphate
  modified_base 12: mod_base = OTHER; note = 2'-O-methylcytidine-3'-phosphate
  modified_base 13: mod_base = OTHER; note = 2'-O-methylcytidine-3'-phosphate
  modified_base 14: mod_base = OTHER; note = 2'-O-methyluridine-3'-phosphate
  modified_base 15: mod_base = OTHER; note = 2'-O-methyluridine-3'-phosphate
  modified_base 16: mod_base = OTHER; note = 2'-O-methylcytidine-3'-phosphate
  modified_base 17: mod_base = OTHER; note = 2'-O-methylcytidine-3'-phosphate
  modified_base 18: mod_base = OTHER; note = 2'-O-methyluridine-3'-phosphate
  modified_base 19: mod_base = OTHER; note = 2'-O-methyladenosine-3'-phosphate
  modified_base 20: mod_base = OTHER; note = 2'-O-methylguanosine-3'-phosphate
  modified_base 21: mod_base = OTHER; note = 2'-O-methyluridine-3'-phosphate N-[tris(GalNAc-alkyl)-amidodecanoyl)]-4-hydroxyprolinol (Hyp-(GalNAc-alkyl)3)
acaccagcagcccttcctagt

SEQ ID NO: 6807 - RNA, 21 nt, synthetic construct
  source 1..21: mol_type = other RNA
  modified_base 1: mod_base = OTHER; note = 2'-O-methyladenosine-3'-phosphorothioate
  modified_base 2: mod_base = OTHER; note = 2'-O-methylcytidine-3'-phosphorothioate
  modified_base 3: mod_base = OTHER; note = 2'-O-methylcytidine-3'-phosphate
  modified_base 4: mod_base = OTHER; note = 2'-O-methyladenosine-3'-phosphate
  modified_base 5: mod_base = OTHER; note = 2'-O-methylguanosine-3'-phosphate
  modified_base 6: mod_base = OTHER; note = 2'-O-methylcytidine-3'-phosphate
  modified_base 7: mod_base = OTHER; note = 2'-O-methyladenosine-3'-phosphate
  modified_base 8: mod_base = OTHER; note = 2'-O-methylguanosine-3'-phosphate
  modified_base 9: mod_base = OTHER; note = 2'-fluorocytidine-3'-phosphate
  modified_base 10: mod_base = OTHER; note = 2'-fluorocytidine-3'-phosphate
  modified_base 11: mod_base = OTHER; note = 2'-fluorocytidine-3'-phosphate
  modified_base 12: mod_base = OTHER; note = 2'-O-methyluridine-3'-phosphate
  modified_base 13: mod_base = OTHER; note = 2'-O-methyluridine-3'-phosphate
  modified_base 14: mod_base = OTHER; note = 2'-O-methylcytidine-3'-phosphate
  modified_base 15: mod_base = OTHER; note = 2'-O-methylcytidine-3'-phosphate
  modified_base 16: mod_base = OTHER; note = 2'-O-methyluridine-3'-phosphate
  modified_base 17: mod_base = OTHER; note = 2'-O-methyladenosine-3'-phosphate
  modified_base 18: mod_base = OTHER; note = 2'-O-methylguanosine-3'-phosphate
  modified_base 19: mod_base = OTHER; note = 2'-O-methyladenosine-3'-phosphate
  modified_base 20: mod_base = OTHER; note = 2'-O-methylguanosine-3'-phosphate
  modified_base 21: mod_base = OTHER; note = 2'-O-methyluridine-3'-phosphate N-[tris(GalNAc-alkyl)-amidodecanoyl)]-4-hydroxyprolinol (Hyp-(GalNAc-alkyl)3)
accagcagcccttcctagagt

SEQ ID NO: 6808 - RNA, 21 nt, synthetic construct
  source 1..21: mol_type = other RNA
  modified_base 1: mod_base = OTHER; note = 2'-O-methylcytidine-3'-phosphorothioate
  modified_base 2: mod_base = OTHER; note = 2'-O-methylcytidine-3'-phosphorothioate
  modified_base 3: mod_base = OTHER; note = 2'-O-methyladenosine-3'-phosphate
  modified_base 4: mod_base = OTHER; note = 2'-O-methylguanosine-3'-phosphate
  modified_base 5: mod_base = OTHER; note = 2'-O-methylcytidine-3'-phosphate
  modified_base 6: mod_base = OTHER; note = 2'-O-methyladenosine-3'-phosphate
  modified_base 7: mod_base = OTHER; note = 2'-O-methylguanosine-3'-phosphate
  modified_base 8: mod_base = OTHER; note = 2'-O-methylcytidine-3'-phosphate
  modified_base 9: mod_base = OTHER; note = 2'-fluorocytidine-3'-phosphate
  modified_base 10: mod_base = OTHER; note = 2'-fluorocytidine-3'-phosphate
  modified_base 11: mod_base = OTHER; note = 2'-fluorouridine-3'-phosphate
  modified_base 12: mod_base = OTHER; note = 2'-O-methyluridine-3'-phosphate
  modified_base 13: mod_base = OTHER; note = 2'-O-methylcytidine-3'-phosphate
  modified_base 14: mod_base = OTHER; note = 2'-O-methylcytidine-3'-phosphate
  modified_base 15: mod_base = OTHER; note = 2'-O-methyluridine-3'-phosphate
  modified_base 16: mod_base = OTHER; note = 2'-O-methyladenosine-3'-phosphate
  modified_base 17: mod_base = OTHER; note = 2'-O-methylguanosine-3'-phosphate
  modified_base 18: mod_base = OTHER; note = 2'-O-methyladenosine-3'-phosphate
  modified_base 19: mod_base = OTHER; note = 2'-O-methylguanosine-3'-phosphate
  modified_base 20: mod_base = OTHER; note = 2'-O-methylcytidine-3'-phosphate
  modified_base 21: mod_base = OTHER; note = 2'-O-methyluridine-3'-phosphate N-[tris(GalNAc-alkyl)-amidodecanoyl)]-4-hydroxyprolinol (Hyp-(GalNAc-alkyl)3)
ccagcagcccttcctagagct

SEQ ID NO: 6809 - RNA, 21 nt, synthetic construct
  source 1..21: mol_type = other RNA
  modified_base 1: mod_base = OTHER; note = 2'-O-methylcytidine-3'-phosphorothioate
  modified_base 2: mod_base = OTHER; note = 2'-O-methyladenosine-3'-phosphorothioate
  modified_base 3: mod_base = OTHER; note = 2'-O-methylguanosine-3'-phosphate
  modified_base 4: mod_base = OTHER; note = 2'-O-methylcytidine-3'-phosphate
  modified_base 5: mod_base = OTHER; note = 2'-O-methyladenosine-3'-phosphate
  modified_base 6: mod_base = OTHER; note = 2'-O-methylguanosine-3'-phosphate
  modified_base 7: mod_base = OTHER; note = 2'-O-methylcytidine-3'-phosphate
  modified_base 8: mod_base = OTHER; note = 2'-O-methylcytidine-3'-phosphate
  modified_base 9: mod_base = OTHER; note = 2'-fluorocytidine-3'-phosphate
  modified_base 10: mod_base = OTHER; note = 2'-fluorouridine-3'-phosphate
  modified_base 11: mod_base = OTHER; note = 2'-fluorouridine-3'-phosphate
  modified_base 12: mod_base = OTHER; note = 2'-O-methylcytidine-3'-phosphate
  modified_base 13: mod_base = OTHER; note = 2'-O-methylcytidine-3'-phosphate
  modified_base 14: mod_base = OTHER; note = 2'-O-methyluridine-3'-phosphate
  modified_base 15: mod_base = OTHER; note = 2'-O-methyladenosine-3'-phosphate
  modified_base 16: mod_base = OTHER; note = 2'-O-methylguanosine-3'-phosphate
  modified_base 17: mod_base = OTHER; note = 2'-O-methyladenosine-3'-phosphate
  modified_base 18: mod_base = OTHER; note = 2'-O-methylguanosine-3'-phosphate
  modified_base 19: mod_base = OTHER; note = 2'-O-methylcytidine-3'-phosphate
  modified_base 20: mod_base = OTHER; note = 2'-O-methyluridine-3'-phosphate
  modified_base 21: mod_base = OTHER; note = 2'-O-methyluridine-3'-phosphate N-[tris(GalNAc-alkyl)-amidodecanoyl)]-4-hydroxyprolinol (Hyp-(GalNAc-alkyl)3)
cagcagcccttcctagagctt

SEQ ID NO: 6810 - RNA, 21 nt, synthetic construct
  source 1..21: mol_type = other RNA
  modified_base 1: mod_base = OTHER; note = 2'-O-methylguanosine-3'-phosphorothioate
  modified_base 2: mod_base = OTHER; note = 2'-O-methylcytidine-3'-phosphorothioate
  modified_base 3: mod_base = OTHER; note = 2'-O-methyladenosine-3'-phosphate
  modified_base 4: mod_base = OTHER; note = 2'-O-methylguanosine-3'-phosphate
  modified_base 5: mod_base = OTHER; note = 2'-O-methylcytidine-3'-phosphate
  modified_base 6: mod_base = OTHER; note = 2'-O-methylcytidine-3'-phosphate
  modified_base 7: mod_base = OTHER; note = 2'-O-methylcytidine-3'-phosphate
  modified_base 8: mod_base = OTHER; note = 2'-O-methyluridine-3'-phosphate
  modified_base 9: mod_base = OTHER; note = 2'-fluorouridine-3'-phosphate
  modified_base 10: mod_base = OTHER; note = 2'-fluorocytidine-3'-phosphate
  modified_base 11: mod_base = OTHER; note = 2'-fluorocytidine-3'-phosphate
  modified_base 12: mod_base = OTHER; note = 2'-O-methyluridine-3'-phosphate
  modified_base 13: mod_base = OTHER; note = 2'-O-methyladenosine-3'-phosphate
  modified_base 14: mod_base = OTHER; note = 2'-O-methylguanosine-3'-phosphate
  modified_base 15: mod_base = OTHER; note = 2'-O-methyladenosine-3'-phosphate
  modified_base 16: mod_base = OTHER; note = 2'-O-methylguanosine-3'-phosphate
  modified_base 17: mod_base = OTHER; note = 2'-O-methylcytidine-3'-phosphate
  modified_base 18: mod_base = OTHER; note = 2'-O-methyluridine-3'-phosphate
  modified_base 19: mod_base = OTHER; note = 2'-O-methyluridine-3'-phosphate
  modified_base 20: mod_base = OTHER; note = 2'-O-methyladenosine-3'-phosphate
  modified_base 21: mod_base = OTHER; note = 2'-O-methyluridine-3'-phosphate N-[tris(GalNAc-alkyl)-amidodecanoyl)]-4-hydroxyprolinol (Hyp-(GalNAc-alkyl)3)
gcagcccttcctagagcttat

SEQ ID NO: 6811 - RNA, 21 nt, synthetic construct
  source 1..21: mol_type = other RNA
  modified_base 1: mod_base = OTHER; note = 2'-O-methylcytidine-3'-phosphorothioate
  modified_base 2: mod_base = OTHER; note = 2'-O-methyladenosine-3'-phosphorothioate
  modified_base 3: mod_base = OTHER; note = 2'-O-methylguanosine-3'-phosphate
  modified_base 4: mod_base = OTHER; note = 2'-O-methylcytidine-3'-phosphate
  modified_base 5: mod_base = OTHER; note = 2'-O-methylcytidine-3'-phosphate
  modified_base 6: mod_base = OTHER; note = 2'-O-methylcytidine-3'-phosphate
  modified_base 7: mod_base = OTHER; note = 2'-O-methyluridine-3'-phosphate
  modified_base 8: mod_base = OTHER; note = 2'-O-methyluridine-3'-phosphate
  modified_base 9: mod_base = OTHER; note = 2'-fluorocytidine-3'-phosphate
  modified_base 10: mod_base = OTHER; note = 2'-fluorocytidine-3'-phosphate
  modified_base 11: mod_base = OTHER; note = 2'-fluorouridine-3'-phosphate
  modified_base 12: mod_base = OTHER; note = 2'-O-methyladenosine-3'-phosphate
  modified_base 13: mod_base = OTHER; note = 2'-O-methylguanosine-3'-phosphate
  modified_base 14: mod_base = OTHER; note = 2'-O-methyladenosine-3'-phosphate
  modified_base 15: mod_base = OTHER; note = 2'-O-methylguanosine-3'-phosphate
  modified_base 16: mod_base = OTHER; note = 2'-O-methylcytidine-3'-phosphate
  modified_base 17: mod_base = OTHER; note = 2'-O-methyluridine-3'-phosphate
  modified_base 18: mod_base = OTHER; note = 2'-O-methyluridine-3'-phosphate
  modified_base 19: mod_base = OTHER; note = 2'-O-methyladenosine-3'-phosphate
  modified_base 20: mod_base = OTHER; note = 2'-O-methyladenosine-3'-phosphate
  modified_base 21: mod_base = OTHER; note = 2'-O-methyluridine-3'-phosphate N-[tris(GalNAc-alkyl)-amidodecanoyl)]-4-hydroxyprolinol (Hyp-(GalNAc-alkyl)3)
cagcccttcctagagcttaat

SEQ ID NO: 6812 - RNA, 21 nt, synthetic construct
  source 1..21: mol_type = other RNA
  modified_base 1: mod_base = OTHER; note = 2'-O-methyladenosine-3'-phosphorothioate
  modified_base 2: mod_base = OTHER; note = 2'-O-methylguanosine-3'-phosphorothioate
  modified_base 3: mod_base = OTHER; note = 2'-O-methylcytidine-3'-phosphate
  modified_base 4: mod_base = OTHER; note = 2'-O-methylcytidine-3'-phosphate
  modified_base 5: mod_base = OTHER; note = 2'-O-methylcytidine-3'-phosphate
  modified_base 6: mod_base = OTHER; note = 2'-O-methyluridine-3'-phosphate
  modified_base 7: mod_base = OTHER; note = 2'-O-methyluridine-3'-phosphate
  modified_base 8: mod_base = OTHER; note = 2'-O-methylcytidine-3'-phosphate
  modified_base 9: mod_base = OTHER; note = 2'-fluorocytidine-3'-phosphate
  modified_base 10: mod_base = OTHER; note = 2'-fluorouridine-3'-phosphate
  modified_base 11: mod_base = OTHER; note = 2'-fluoroadenosine-3'-phosphate
  modified_base 12: mod_base = OTHER; note = 2'-O-methylguanosine-3'-phosphate
  modified_base 13: mod_base = OTHER; note = 2'-O-methyladenosine-3'-phosphate
  modified_base 14: mod_base = OTHER; note = 2'-O-methylguanosine-3'-phosphate
  modified_base 15: mod_base = OTHER; note = 2'-O-methylcytidine-3'-phosphate
  modified_base 16: mod_base = OTHER; note = 2'-O-methyluridine-3'-phosphate
  modified_base 17: mod_base = OTHER; note = 2'-O-methyluridine-3'-phosphate
  modified_base 18: mod_base = OTHER; note = 2'-O-methyladenosine-3'-phosphate
  modified_base 19: mod_base = OTHER; note = 2'-O-methyladenosine-3'-phosphate
  modified_base 20: mod_base = OTHER; note = 2'-O-methylguanosine-3'-phosphate
  modified_base 21: mod_base = OTHER; note = 2'-O-methyluridine-3'-phosphate N-[tris(GalNAc-alkyl)-amidodecanoyl)]-4-hydroxyprolinol (Hyp-(GalNAc-alkyl)3)
agcccttcctagagcttaagt

SEQ ID NO: 6813 - RNA, 21 nt, synthetic construct
  source 1..21: mol_type = other RNA
  modified_base 1: mod_base = OTHER; note = 2'-O-methylguanosine-3'-phosphorothioate
  modified_base 2: mod_base = OTHER; note = 2'-O-methylcytidine-3'-phosphorothioate
  modified_base 3: mod_base = OTHER; note = 2'-O-methylcytidine-3'-phosphate
  modified_base 4: mod_base = OTHER; note = 2'-O-methylcytidine-3'-phosphate
  modified_base 5: mod_base = OTHER; note = 2'-O-methyluridine-3'-phosphate
  modified_base 6: mod_base = OTHER; note = 2'-O-methyluridine-3'-phosphate
  modified_base 7: mod_base = OTHER; note = 2'-O-methylcytidine-3'-phosphate
  modified_base 8: mod_base = OTHER; note = 2'-O-methylcytidine-3'-phosphate
  modified_base 9: mod_base = OTHER; note = 2'-fluorouridine-3'-phosphate
  modified_base 10: mod_base = OTHER; note = 2'-fluoroadenosine-3'-phosphate
  modified_base 11: mod_base = OTHER; note = 2'-fluoroguanosine-3'-phosphate
  modified_base 12: mod_base = OTHER; note = 2'-O-methyladenosine-3'-phosphate
  modified_base 13: mod_base = OTHER; note = 2'-O-methylguanosine-3'-phosphate
  modified_base 14: mod_base = OTHER; note = 2'-O-methylcytidine-3'-phosphate
  modified_base 15: mod_base = OTHER; note = 2'-O-methyluridine-3'-phosphate
  modified_base 16: mod_base = OTHER; note = 2'-O-methyluridine-3'-phosphate
  modified_base 17: mod_base = OTHER; note = 2'-O-methyladenosine-3'-phosphate
  modified_base 18: mod_base = OTHER; note = 2'-O-methyladenosine-3'-phosphate
  modified_base 19: mod_base = OTHER; note = 2'-O-methylguanosine-3'-phosphate
  modified_base 20: mod_base = OTHER; note = 2'-O-methyladenosine-3'-phosphate
  modified_base 21: mod_base = OTHER; note = 2'-O-methyluridine-3'-phosphate N-[tris(GalNAc-alkyl)-amidodecanoyl)]-4-hydroxyprolinol (Hyp-(GalNAc-alkyl)3)
gcccttcctagagcttaagat

SEQ ID NO: 6814 - RNA, 21 nt, synthetic construct
  source 1..21: mol_type = other RNA
  modified_base 1: mod_base = OTHER; note = 2'-O-methylcytidine-3'-phosphorothioate
  modified_base 2: mod_base = OTHER; note = 2'-O-methylcytidine-3'-phosphorothioate
  modified_base 3: mod_base = OTHER; note = 2'-O-methylcytidine-3'-phosphate
  modified_base 4: mod_base = OTHER; note = 2'-O-methyluridine-3'-phosphate
  modified_base 5: mod_base = OTHER; note = 2'-O-methyluridine-3'-phosphate
  modified_base 6: mod_base = OTHER; note = 2'-O-methylcytidine-3'-phosphate
  modified_base 7: mod_base = OTHER; note = 2'-O-methylcytidine-3'-phosphate
  modified_base 8: mod_base = OTHER; note = 2'-O-methyluridine-3'-phosphate
  modified_base 9: mod_base = OTHER; note = 2'-fluoroadenosine-3'-phosphate
  modified_base 10: mod_base = OTHER; note = 2'-fluoroguanosine-3'-phosphate
  modified_base 11: mod_base = OTHER; note = 2'-fluoroadenosine-3'-phosphate
  modified_base 12: mod_base = OTHER; note = 2'-O-methylguanosine-3'-phosphate
  modified_base 13: mod_base = OTHER; note = 2'-O-methylcytidine-3'-phosphate
  modified_base 14: mod_base = OTHER; note = 2'-O-methyluridine-3'-phosphate
  modified_base 15: mod_base = OTHER; note = 2'-O-methyluridine-3'-phosphate
  modified_base 16: mod_base = OTHER; note = 2'-O-methyladenosine-3'-phosphate
  modified_base 17: mod_base = OTHER; note = 2'-O-methyladenosine-3'-phosphate
  modified_base 18: mod_base = OTHER; note = 2'-O-methylguanosine-3'-phosphate
  modified_base 19: mod_base = OTHER; note = 2'-O-methyladenosine-3'-phosphate
  modified_base 20: mod_base = OTHER; note = 2'-O-methyluridine-3'-phosphate
  modified_base 21: mod_base = OTHER; note = 2'-O-methyluridine-3'-phosphate N-[tris(GalNAc-alkyl)-amidodecanoyl)]-4-hydroxyprolinol (Hyp-(GalNAc-alkyl)3)
cccttcctagagcttaagatt

SEQ ID NO: 6815 - RNA, 21 nt, synthetic construct
  source 1..21: mol_type = other RNA
  modified_base 1: mod_base = OTHER; note = 2'-O-methylcytidine-3'-phosphorothioate
  modified_base 2: mod_base = OTHER; note = 2'-O-methylcytidine-3'-phosphorothioate
  modified_base 3: mod_base = OTHER; note = 2'-O-methyluridine-3'-phosphate
  modified_base 4: mod_base = OTHER; note = 2'-O-methyluridine-3'-phosphate
  modified_base 5: mod_base = OTHER; note = 2'-O-methylcytidine-3'-phosphate
  modified_base 6: mod_base = OTHER; note = 2'-O-methylcytidine-3'-phosphate
  modified_base 7: mod_base = OTHER; note = 2'-O-methyluridine-3'-phosphate
  modified_base 8: mod_base = OTHER; note = 2'-O-methyladenosine-3'-phosphate
  modified_base 9: mod_base = OTHER; note = 2'-fluoroguanosine-3'-phosphate
  modified_base 10: mod_base = OTHER; note = 2'-fluoroadenosine-3'-phosphate
  modified_base 11: mod_base = OTHER; note = 2'-fluoroguanosine-3'-phosphate
  modified_base 12: mod_base = OTHER; note = 2'-O-methylcytidine-3'-phosphate
  modified_base 13: mod_base = OTHER; note = 2'-O-methyluridine-3'-phosphate
  modified_base 14: mod_base = OTHER; note = 2'-O-methyluridine-3'-phosphate
  modified_base 15: mod_base = OTHER; note = 2'-O-methyladenosine-3'-phosphate
  modified_base 16: mod_base = OTHER; note = 2'-O-methyladenosine-3'-phosphate
  modified_base 17: mod_base = OTHER; note = 2'-O-methylguanosine-3'-phosphate
  modified_base 18: mod_base = OTHER; note = 2'-O-methyladenosine-3'-phosphate
  modified_base 19: mod_base = OTHER; note = 2'-O-methyluridine-3'-phosphate
  modified_base 20: mod_base = OTHER; note = 2'-O-methylcytidine-3'-phosphate
  modified_base 21: mod_base = OTHER; note = 2'-O-methyluridine-3'-phosphate N-[tris(GalNAc-alkyl)-amidodecanoyl)]-4-hydroxyprolinol (Hyp-(GalNAc-alkyl)3)
ccttcctagagcttaagatct

SEQ ID NO: 6816 - RNA, 21 nt, synthetic construct
  source 1..21: mol_type = other RNA
  modified_base 1: mod_base = OTHER; note = 2'-O-methyluridine-3'-phosphorothioate
  modified_base 2: mod_base = OTHER; note = 2'-O-methyluridine-3'-phosphorothioate
  modified_base 3: mod_base = OTHER; note = 2'-O-methyladenosine-3'-phosphate
  modified_base 4: mod_base = OTHER; note = 2'-O-methylcytidine-3'-phosphate
  modified_base 5: mod_base = OTHER; note = 2'-O-methylguanosine-3'-phosphate
  modified_base 6: mod_base = OTHER; note = 2'-O-methyluridine-3'-phosphate
  modified_base 7: mod_base = OTHER; note = 2'-O-methyladenosine-3'-phosphate
  modified_base 8: mod_base = OTHER; note = 2'-O-methylguanosine-3'-phosphate
  modified_base 9: mod_base = OTHER; note = 2'-fluoroadenosine-3'-phosphate
  modified_base 10: mod_base = OTHER; note = 2'-fluorocytidine-3'-phosphate
  modified_base 11: mod_base = OTHER; note = 2'-fluorouridine-3'-phosphate
  modified_base 12: mod_base = OTHER; note = 2'-O-methyluridine-3'-phosphate
  modified_base 13: mod_base = OTHER; note = 2'-O-methylcytidine-3'-phosphate
  modified_base 14: mod_base = OTHER; note = 2'-O-methylcytidine-3'-phosphate
  modified_base 15: mod_base = OTHER; note = 2'-O-methyladenosine-3'-phosphate
  modified_base 16: mod_base = OTHER; note = 2'-O-methylguanosine-3'-phosphate
  modified_base 17: mod_base = OTHER; note = 2'-O-methylguanosine-3'-phosphate
  modified_base 18: mod_base = OTHER; note = 2'-O-methyladenosine-3'-phosphate
  modified_base 19: mod_base = OTHER; note = 2'-O-methyladenosine-3'-phosphate
  modified_base 20: mod_base = OTHER; note = 2'-O-methylcytidine-3'-phosphate
  modified_base 21: mod_base = OTHER; note = 2'-O-methyluridine-3'-phosphate N-[tris(GalNAc-alkyl)-amidodecanoyl)]-4-hydroxyprolinol (Hyp-(GalNAc-alkyl)3)
ttacgtagacttccaggaact

SEQ ID NO: 6817 - RNA, 21 nt, synthetic construct
  source 1..21: mol_type = other RNA
  modified_base 1: mod_base = OTHER; note = 2'-O-methyluridine-3'-phosphorothioate
  modified_base 2: mod_base = OTHER; note = 2'-O-methyladenosine-3'-phosphorothioate
  modified_base 3: mod_base = OTHER; note = 2'-O-methylcytidine-3'-phosphate
  modified_base 4: mod_base = OTHER; note = 2'-O-methylguanosine-3'-phosphate
  modified_base 5: mod_base = OTHER; note = 2'-O-methyluridine-3'-phosphate
  modified_base 6: mod_base = OTHER; note = 2'-O-methyladenosine-3'-phosphate
  modified_base 7: mod_base = OTHER; note = 2'-O-methylguanosine-3'-phosphate
  modified_base 8: mod_base = OTHER; note = 2'-O-methyladenosine-3'-phosphate
  modified_base 9: mod_base = OTHER; note = 2'-fluorocytidine-3'-phosphate
  modified_base 10: mod_base = OTHER; note = 2'-fluorouridine-3'-phosphate
  modified_base 11: mod_base = OTHER; note = 2'-fluorouridine-3'-phosphate
  modified_base 12: mod_base = OTHER; note = 2'-O-methylcytidine-3'-phosphate
  modified_base 13: mod_base = OTHER; note = 2'-O-methylcytidine-3'-phosphate
  modified_base 14: mod_base = OTHER; note = 2'-O-methyladenosine-3'-phosphate
  modified_base 15: mod_base = OTHER; note = 2'-O-methylguanosine-3'-phosphate
  modified_base 16: mod_base = OTHER; note = 2'-O-methylguanosine-3'-phosphate
  modified_base 17: mod_base = OTHER; note = 2'-O-methyladenosine-3'-phosphate
  modified_base 18: mod_base = OTHER; note = 2'-O-methyladenosine-3'-phosphate
  modified_base 19: mod_base = OTHER; note = 2'-O-methylcytidine-3'-phosphate
  modified_base 20: mod_base = OTHER; note = 2'-O-methyluridine-3'-phosphate
  modified_base 21: mod_base = OTHER; note = 2'-O-methyluridine-3'-phosphate N-[tris(GalNAc-alkyl)-amidodecanoyl)]-4-hydroxyprolinol (Hyp-(GalNAc-alkyl)3)
tacgtagacttccaggaactt

SEQ ID NO: 6818 - RNA, 21 nt, synthetic construct
  source 1..21: mol_type = other RNA
  modified_base 1: mod_base = OTHER; note = 2'-O-methyladenosine-3'-phosphorothioate
  modified_base 2: mod_base = OTHER; note = 2'-O-methylcytidine-3'-phosphorothioate
  modified_base 3: mod_base = OTHER; note = 2'-O-methylguanosine-3'-phosphate
  modified_base 4: mod_base = OTHER; note = 2'-O-methyluridine-3'-phosphate
  modified_base 5: mod_base = OTHER; note = 2'-O-methyladenosine-3'-phosphate
  modified_base 6: mod_base = OTHER; note = 2'-O-methylguanosine-3'-phosphate
  modified_base 7: mod_base = OTHER; note = 2'-O-methyladenosine-3'-phosphate
  modified_base 8: mod_base = OTHER; note = 2'-O-methylcytidine-3'-phosphate
  modified_base 9: mod_base = OTHER; note = 2'-fluorouridine-3'-phosphate
  modified_base 10: mod_base = OTHER; note = 2'-fluorouridine-3'-phosphate
  modified_base 11: mod_base = OTHER; note = 2'-fluorocytidine-3'-phosphate
  modified_base 12: mod_base = OTHER; note = 2'-O-methylcytidine-3'-phosphate
  modified_base 13: mod_base = OTHER; note = 2'-O-methyladenosine-3'-phosphate
  modified_base 14: mod_base = OTHER; note = 2'-O-methylguanosine-3'-phosphate
  modified_base 15: mod_base = OTHER; note = 2'-O-methylguanosine-3'-phosphate
  modified_base 16: mod_base = OTHER; note = 2'-O-methyladenosine-3'-phosphate
  modified_base 17: mod_base = OTHER; note = 2'-O-methyladenosine-3'-phosphate
  modified_base 18: mod_base = OTHER; note = 2'-O-methylcytidine-3'-phosphate
  modified_base 19: mod_base = OTHER; note = 2'-O-methyluridine-3'-phosphate
  modified_base 20: mod_base = OTHER; note = 2'-O-methylguanosine-3'-phosphate
  modified_base 21: mod_base = OTHER; note = 2'-O-methyluridine-3'-phosphate N-[tris(GalNAc-alkyl)-amidodecanoyl)]-4-hydroxyprolinol (Hyp-(GalNAc-alkyl)3)
acgtagacttccaggaactgt

SEQ ID NO: 6819 - RNA, 21 nt, synthetic construct
  source 1..21: mol_type = other RNA
  modified_base 1: mod_base = OTHER; note = 2'-O-methylcytidine-3'-phosphorothioate
  modified_base 2: mod_base = OTHER; note = 2'-O-methylguanosine-3'-phosphorothioate
  modified_base 3: mod_base = OTHER; note = 2'-O-methyluridine-3'-phosphate
  modified_base 4: mod_base = OTHER; note = 2'-O-methyladenosine-3'-phosphate
  modified_base 5: mod_base = OTHER; note = 2'-O-methylguanosine-3'-phosphate
  modified_base 6: mod_base = OTHER; note = 2'-O-methyladenosine-3'-phosphate
  modified_base 7: mod_base = OTHER; note = 2'-O-methylcytidine-3'-phosphate
  modified_base 8: mod_base = OTHER; note = 2'-O-methyluridine-3'-phosphate
  modified_base 9: mod_base = OTHER; note = 2'-fluorouridine-3'-phosphate
  modified_base 10: mod_base = OTHER; note = 2'-fluorocytidine-3'-phosphate
  modified_base 11: mod_base = OTHER; note = 2'-fluorocytidine-3'-phosphate
  modified_base 12: mod_base = OTHER; note = 2'-O-methyladenosine-3'-phosphate
  modified_base 13: mod_base = OTHER; note = 2'-O-methylguanosine-3'-phosphate
  modified_base 14: mod_base = OTHER; note = 2'-O-methylguanosine-3'-phosphate
  modified_base 15: mod_base = OTHER; note = 2'-O-methyladenosine-3'-phosphate
  modified_base 16: mod_base = OTHER; note = 2'-O-methyladenosine-3'-phosphate
  modified_base 17: mod_base = OTHER; note = 2'-O-methylcytidine-3'-phosphate
  modified_base 18: mod_base = OTHER; note = 2'-O-methyluridine-3'-phosphate
  modified_base 19: mod_base = OTHER; note = 2'-O-methylguanosine-3'-phosphate
  modified_base 20: mod_base = OTHER; note = 2'-O-methylguanosine-3'-phosphate
  modified_base 21: mod_base = OTHER; note = 2'-O-methyluridine-3'-phosphate N-[tris(GalNAc-alkyl)-amidodecanoyl)]-4-hydroxyprolinol (Hyp-(GalNAc-alkyl)3)
cgtagacttccaggaactggt

SEQ ID NO: 6820 - RNA, 21 nt, synthetic construct
  source 1..21: mol_type = other RNA
  modified_base 1: mod_base = OTHER; note = 2'-O-methyluridine-3'-phosphorothioate
  modified_base 2: mod_base = OTHER; note = 2'-O-methyladenosine-3'-phosphorothioate
  modified_base 3: mod_base = OTHER; note = 2'-O-methylguanosine-3'-phosphate
  modified_base 4: mod_base = OTHER; note = 2'-O-methyladenosine-3'-phosphate
  modified_base 5: mod_base = OTHER; note = 2'-O-methylcytidine-3'-phosphate
  modified_base 6: mod_base = OTHER; note = 2'-O-methyluridine-3'-phosphate
  modified_base 7: mod_base = OTHER; note = 2'-O-methyluridine-3'-phosphate
  modified_base 8: mod_base = OTHER; note = 2'-O-methylcytidine-3'-phosphate
  modified_base 9: mod_base = OTHER; note = 2'-fluorocytidine-3'-phosphate
  modified_base 10: mod_base = OTHER; note = 2'-fluoroadenosine-3'-phosphate
  modified_base 11: mod_base = OTHER; note = 2'-fluoroguanosine-3'-phosphate
  modified_base 12: mod_base = OTHER; note = 2'-O-methylguanosine-3'-phosphate
  modified_base 13: mod_base = OTHER; note = 2'-O-methyladenosine-3'-phosphate
  modified_base 14: mod_base = OTHER; note = 2'-O-methyladenosine-3'-phosphate
  modified_base 15: mod_base = OTHER; note = 2'-O-methylcytidine-3'-phosphate
  modified_base 16: mod_base = OTHER; note = 2'-O-methyluridine-3'-phosphate
  modified_base 17: mod_base = OTHER; note = 2'-O-methylguanosine-3'-phosphate
  modified_base 18: mod_base = OTHER; note = 2'-O-methylguanosine-3'-phosphate
  modified_base 19: mod_base = OTHER; note = 2'-O-methylguanosine-3'-phosphate
  modified_base 20: mod_base = OTHER; note = 2'-O-methyladenosine-3'-phosphate
  modified_base 21: mod_base = OTHER; note = 2'-O-methyluridine-3'-phosphate N-[tris(GalNAc-alkyl)-amidodecanoyl)]-4-hydroxyprolinol (Hyp-(GalNAc-alkyl)3)
tagacttccaggaactgggat

SEQ ID NO: 6821 - RNA, 21 nt, synthetic construct
  source 1..21: mol_type = other RNA
  modified_base 1: mod_base = OTHER; note = 2'-O-methyladenosine-3'-phosphorothioate
  modified_base 2: mod_base = OTHER; note = 2'-O-methylguanosine-3'-phosphorothioate
  modified_base 3: mod_base = OTHER; note = 2'-O-methyladenosine-3'-phosphate
  modified_base 4: mod_base = OTHER; note = 2'-O-methylcytidine-3'-phosphate
  modified_base 5: mod_base = OTHER; note = 2'-O-methyluridine-3'-phosphate
  modified_base 6: mod_base = OTHER; note = 2'-O-methyluridine-3'-phosphate
  modified_base 7: mod_base = OTHER; note = 2'-O-methylcytidine-3'-phosphate
  modified_base 8: mod_base = OTHER; note = 2'-O-methylcytidine-3'-phosphate
  modified_base 9: mod_base = OTHER; note = 2'-fluoroadenosine-3'-phosphate
  modified_base 10: mod_base = OTHER; note = 2'-fluoroguanosine-3'-phosphate
  modified_base 11: mod_base = OTHER; note = 2'-fluoroguanosine-3'-phosphate
  modified_base 12: mod_base = OTHER; note = 2'-O-methyladenosine-3'-phosphate
  modified_base 13: mod_base = OTHER; note = 2'-O-methyladenosine-3'-phosphate
  modified_base 14: mod_base = OTHER; note = 2'-O-methylcytidine-3'-phosphate
  modified_base 15: mod_base = OTHER; note = 2'-O-methyluridine-3'-phosphate
  modified_base 16: mod_base = OTHER; note = 2'-O-methylguanosine-3'-phosphate
  modified_base 17: mod_base = OTHER; note = 2'-O-methylguanosine-3'-phosphate
  modified_base 18: mod_base = OTHER; note = 2'-O-methylguanosine-3'-phosphate
  modified_base 19: mod_base = OTHER; note = 2'-O-methyladenosine-3'-phosphate
  modified_base 20: mod_base = OTHER; note = 2'-O-methyluridine-3'-phosphate
  modified_base 21: mod_base = OTHER; note = 2'-O-methyluridine-3'-phosphate N-[tris(GalNAc-alkyl)-amidodecanoyl)]-4-hydroxyprolinol (Hyp-(GalNAc-alkyl)3)
agacttccaggaactgggatt

SEQ ID NO: 6822 - RNA, 21 nt, synthetic construct
  source 1..21: mol_type = other RNA
  modified_base 1: mod_base = OTHER; note = 2'-O-methylguanosine-3'-phosphorothioate
  modified_base 2: mod_base = OTHER; note = 2'-O-methyladenosine-3'-phosphorothioate
  modified_base 3: mod_base = OTHER; note = 2'-O-methylcytidine-3'-phosphate
  modified_base 4: mod_base = OTHER; note = 2'-O-methyluridine-3'-phosphate
  modified_base 5: mod_base = OTHER; note = 2'-O-methyluridine-3'-phosphate
  modified_base 6: mod_base = OTHER; note = 2'-O-methylcytidine-3'-phosphate
  modified_base 7: mod_base = OTHER; note = 2'-O-methylcytidine-3'-phosphate
  modified_base 8: mod_base = OTHER; note = 2'-O-methyladenosine-3'-phosphate
  modified_base 9: mod_base = OTHER; note = 2'-fluoroguanosine-3'-phosphate
  modified_base 10: mod_base = OTHER; note = 2'-fluoroguanosine-3'-phosphate
  modified_base 11: mod_base = OTHER; note = 2'-fluoroadenosine-3'-phosphate
  modified_base 12: mod_base = OTHER; note = 2'-O-methyladenosine-3'-phosphate
  modified_base 13: mod_base = OTHER; note = 2'-O-methylcytidine-3'-phosphate
  modified_base 14: mod_base = OTHER; note = 2'-O-methyluridine-3'-phosphate
  modified_base 15: mod_base = OTHER; note = 2'-O-methylguanosine-3'-phosphate
  modified_base 16: mod_base = OTHER; note = 2'-O-methylguanosine-3'-phosphate
  modified_base 17: mod_base = OTHER; note = 2'-O-methylguanosine-3'-phosphate
  modified_base 18: mod_base = OTHER; note = 2'-O-methyladenosine-3'-phosphate
  modified_base 19: mod_base = OTHER; note = 2'-O-methyluridine-3'-phosphate
  modified_base 20: mod_base = OTHER; note = 2'-O-methylguanosine-3'-phosphate
  modified_base 21: mod_base = OTHER; note = 2'-O-methyluridine-3'-phosphate N-[tris(GalNAc-alkyl)-amidodecanoyl)]-4-hydroxyprolinol (Hyp-(GalNAc-alkyl)3)
gacttccaggaactgggatgt

SEQ ID NO: 6823 - RNA, 21 nt, synthetic construct
  source 1..21: mol_type = other RNA
  modified_base 1: mod_base = OTHER; note = 2'-O-methyladenosine-3'-phosphorothioate
  modified_base 2: mod_base = OTHER; note = 2'-O-methylcytidine-3'-phosphorothioate
  modified_base 3: mod_base = OTHER; note = 2'-O-methyluridine-3'-phosphate
  modified_base 4: mod_base = OTHER; note = 2'-O-methyluridine-3'-phosphate
  modified_base 5: mod_base = OTHER; note = 2'-O-methylcytidine-3'-phosphate
  modified_base 6: mod_base = OTHER; note = 2'-O-methylcytidine-3'-phosphate
  modified_base 7: mod_base = OTHER; note = 2'-O-methyladenosine-3'-phosphate
  modified_base 8: mod_base = OTHER; note = 2'-O-methylguanosine-3'-phosphate
  modified_base 9: mod_base = OTHER; note = 2'-fluoroguanosine-3'-phosphate
  modified_base 10: mod_base = OTHER; note = 2'-fluoroadenosine-3'-phosphate
  modified_base 11: mod_base = OTHER; note = 2'-fluoroadenosine-3'-phosphate
  modified_base 12: mod_base = OTHER; note = 2'-O-methylcytidine-3'-phosphate
  modified_base 13: mod_base = OTHER; note = 2'-O-methyluridine-3'-phosphate
  modified_base 14: mod_base = OTHER; note = 2'-O-methylguanosine-3'-phosphate
  modified_base 15: mod_base = OTHER; note = 2'-O-methylguanosine-3'-phosphate
  modified_base 16: mod_base = OTHER; note = 2'-O-methylguanosine-3'-phosphate
  modified_base 17: mod_base = OTHER; note = 2'-O-methyladenosine-3'-phosphate
  modified_base 18: mod_base = OTHER; note = 2'-O-methyluridine-3'-phosphate
  modified_base 19: mod_base = OTHER; note = 2'-O-methylguanosine-3'-phosphate
  modified_base 20: mod_base = OTHER; note = 2'-O-methylguanosine-3'-phosphate
  modified_base 21: mod_base = OTHER; note = 2'-O-methyluridine-3'-phosphate N-[tris(GalNAc-alkyl)-amidodecanoyl)]-4-hydroxyprolinol (Hyp-(GalNAc-alkyl)3)
acttccaggaactgggatggt

SEQ ID NO: 6824 - RNA, 21 nt, synthetic construct
  source 1..21: mol_type = other RNA
  modified_base 1: mod_base = OTHER; note = 2'-O-methylcytidine-3'-phosphorothioate
  modified_base 2: mod_base = OTHER; note = 2'-O-methyluridine-3'-phosphorothioate
  modified_base 3: mod_base = OTHER; note = 2'-O-methyluridine-3'-phosphate
  modified_base 4: mod_base = OTHER; note = 2'-O-methylcytidine-3'-phosphate
  modified_base 5: mod_base = OTHER; note = 2'-O-methylcytidine-3'-phosphate
  modified_base 6: mod_base = OTHER; note = 2'-O-methyladenosine-3'-phosphate
  modified_base 7: mod_base = OTHER; note = 2'-O-methylguanosine-3'-phosphate
  modified_base 8: mod_base = OTHER; note = 2'-O-methylguanosine-3'-phosphate
  modified_base 9: mod_base = OTHER; note = 2'-fluoroadenosine-3'-phosphate
  modified_base 10: mod_base = OTHER; note = 2'-fluoroadenosine-3'-phosphate
  modified_base 11: mod_base = OTHER; note = 2'-fluorocytidine-3'-phosphate
  modified_base 12: mod_base = OTHER; note = 2'-O-methyluridine-3'-phosphate
  modified_base 13: mod_base = OTHER; note = 2'-O-methylguanosine-3'-phosphate
  modified_base 14: mod_base = OTHER; note = 2'-O-methylguanosine-3'-phosphate
  modified_base 15: mod_base = OTHER; note = 2'-O-methylguanosine-3'-phosphate
  modified_base 16: mod_base = OTHER; note = 2'-O-methyladenosine-3'-phosphate
  modified_base 17: mod_base = OTHER; note = 2'-O-methyluridine-3'-phosphate
  modified_base 18: mod_base = OTHER; note = 2'-O-methylguanosine-3'-phosphate
  modified_base 19: mod_base = OTHER; note = 2'-O-methylguanosine-3'-phosphate
  modified_base 20: mod_base = OTHER; note = 2'-O-methylcytidine-3'-phosphate
  modified_base 21: mod_base = OTHER; note = 2'-O-methyluridine-3'-phosphate N-[tris(GalNAc-alkyl)-amidodecanoyl)]-4-hydroxyprolinol (Hyp-(GalNAc-alkyl)3)
cttccaggaactgggatggct

SEQ ID NO: 6825 - RNA, 21 nt, synthetic construct
  source 1..21: mol_type = other RNA
  modified_base 1: mod_base = OTHER; note = 2'-O-methylguanosine-3'-phosphorothioate
  modified_base 2: mod_base = OTHER; note = 2'-O-methyladenosine-3'-phosphorothioate
  modified_base 3: mod_base = OTHER; note = 2'-O-methylcytidine-3'-phosphate
  modified_base 4: mod_base = OTHER; note = 2'-O-methyluridine-3'-phosphate
  modified_base 5: mod_base = OTHER; note = 2'-O-methylguanosine-3'-phosphate
  modified_base 6: mod_base = OTHER; note = 2'-O-methylguanosine-3'-phosphate
  modified_base 7: mod_base = OTHER; note = 2'-O-methyladenosine-3'-phosphate
  modified_base 8: mod_base = OTHER; note = 2'-O-methyluridine-3'-phosphate
  modified_base 9: mod_base = OTHER; note = 2'-fluoroadenosine-3'-phosphate
  modified_base 10: mod_base = OTHER; note = 2'-fluorocytidine-3'-phosphate
  modified_base 11: mod_base = OTHER; note = 2'-fluorouridine-3'-phosphate
  modified_base 12: mod_base = OTHER; note = 2'-O-methylguanosine-3'-phosphate
  modified_base 13: mod_base = OTHER; note = 2'-O-methylcytidine-3'-phosphate
  modified_base 14: mod_base = OTHER; note = 2'-O-methyladenosine-3'-phosphate
  modified_base 15: mod_base = OTHER; note = 2'-O-methylguanosine-3'-phosphate
  modified_base 16: mod_base = OTHER; note = 2'-O-methylcytidine-3'-phosphate
  modified_base 17: mod_base = OTHER; note = 2'-O-methylcytidine-3'-phosphate
  modified_base 18: mod_base = OTHER; note = 2'-O-methylcytidine-3'-phosphate
  modified_base 19: mod_base = OTHER; note = 2'-O-methylguanosine-3'-phosphate
  modified_base 20: mod_base = OTHER; note = 2'-O-methyladenosine-3'-phosphate
  modified_base 21: mod_base = OTHER; note = 2'-O-methyluridine-3'-phosphate N-[tris(GalNAc-alkyl)-amidodecanoyl)]-4-hydroxyprolinol (Hyp-(GalNAc-alkyl)3)
gactggatactgcagcccgat

SEQ ID NO: 6826 - RNA, 21 nt, synthetic construct
  source 1..21: mol_type = other RNA
  modified_base 1: mod_base = OTHER; note = 2'-O-methyladenosine-3'-phosphorothioate
  modified_base 2: mod_base = OTHER; note = 2'-O-methylcytidine-3'-phosphorothioate
  modified_base 3: mod_base = OTHER; note = 2'-O-methyluridine-3'-phosphate
  modified_base 4: mod_base = OTHER; note = 2'-O-methylguanosine-3'-phosphate
  modified_base 5: mod_base = OTHER; note = 2'-O-methylguanosine-3'-phosphate
  modified_base 6: mod_base = OTHER; note = 2'-O-methyladenosine-3'-phosphate
  modified_base 7: mod_base = OTHER; note = 2'-O-methyluridine-3'-phosphate
  modified_base 8: mod_base = OTHER; note = 2'-O-methyladenosine-3'-phosphate
  modified_base 9: mod_base = OTHER; note = 2'-fluorocytidine-3'-phosphate
  modified_base 10: mod_base = OTHER; note = 2'-fluorouridine-3'-phosphate
  modified_base 11: mod_base = OTHER; note = 2'-fluoroguanosine-3'-phosphate
  modified_base 12: mod_base = OTHER; note = 2'-O-methylcytidine-3'-phosphate
  modified_base 13: mod_base = OTHER; note = 2'-O-methyladenosine-3'-phosphate
  modified_base 14: mod_base = OTHER; note = 2'-O-methylguanosine-3'-phosphate
  modified_base 15: mod_base = OTHER; note = 2'-O-methylcytidine-3'-phosphate
  modified_base 16: mod_base = OTHER; note = 2'-O-methylcytidine-3'-phosphate
  modified_base 17: mod_base = OTHER; note = 2'-O-methylcytidine-3'-phosphate
  modified_base 18: mod_base = OTHER; note = 2'-O-methylguanosine-3'-phosphate
  modified_base 19: mod_base = OTHER; note = 2'-O-methyladenosine-3'-phosphate
  modified_base 20: mod_base = OTHER; note = 2'-O-methylguanosine-3'-phosphate
  modified_base 21: mod_base = OTHER; note = 2'-O-methyluridine-3'-phosphate N-[tris(GalNAc-alkyl)-amidodecanoyl)]-4-hydroxyprolinol (Hyp-(GalNAc-alkyl)3)
actggatactgcagcccgagt

SEQ ID NO: 6827 - RNA, 21 nt, synthetic construct
  source 1..21: mol_type = other RNA
  modified_base 1: mod_base = OTHER; note = 2'-O-methylcytidine-3'-phosphorothioate
  modified_base 2: mod_base = OTHER; note = 2'-O-methyluridine-3'-phosphorothioate
  modified_base 3: mod_base = OTHER; note = 2'-O-methylguanosine-3'-phosphate
  modified_base 4: mod_base = OTHER; note = 2'-O-methylguanosine-3'-phosphate
  modified_base 5: mod_base = OTHER; note = 2'-O-methyladenosine-3'-phosphate
  modified_base 6: mod_base = OTHER; note = 2'-O-methyluridine-3'-phosphate
  modified_base 7: mod_base = OTHER; note = 2'-O-methyladenosine-3'-phosphate
  modified_base 8: mod_base = OTHER; note = 2'-O-methylcytidine-3'-phosphate
  modified_base 9: mod_base = OTHER; note = 2'-fluorouridine-3'-phosphate
  modified_base 10: mod_base = OTHER; note = 2'-fluoroguanosine-3'-phosphate
  modified_base 11: mod_base = OTHER; note = 2'-fluorocytidine-3'-phosphate
  modified_base 12: mod_base = OTHER; note = 2'-O-methyladenosine-3'-phosphate
  modified_base 13: mod_base = OTHER; note = 2'-O-methylguanosine-3'-phosphate
  modified_base 14: mod_base = OTHER; note = 2'-O-methylcytidine-3'-phosphate
  modified_base 15: mod_base = OTHER; note = 2'-O-methylcytidine-3'-phosphate
  modified_base 16: mod_base = OTHER; note = 2'-O-methylcytidine-3'-phosphate
  modified_base 17: mod_base = OTHER; note = 2'-O-methylguanosine-3'-phosphate
  modified_base 18: mod_base = OTHER; note = 2'-O-methyladenosine-3'-phosphate
  modified_base 19: mod_base = OTHER; note = 2'-O-methylguanosine-3'-phosphate
  modified_base 20: mod_base = OTHER; note = 2'-O-methylguanosine-3'-phosphate
  modified_base 21: mod_base = OTHER; note = 2'-O-methyluridine-3'-phosphate N-[tris(GalNAc-alkyl)-amidodecanoyl)]-4-hydroxyprolinol (Hyp-(GalNAc-alkyl)3)
ctggatactgcagcccgaggt

SEQ ID NO: 6828 - RNA, 21 nt, synthetic construct
  source 1..21: mol_type = other RNA
  modified_base 1: mod_base = OTHER; note = 2'-O-methylguanosine-3'-phosphorothioate
  modified_base 2: mod_base = OTHER; note = 2'-O-methyluridine-3'-phosphorothioate
  modified_base 3: mod_base = OTHER; note = 2'-O-methyladenosine-3'-phosphate
  modified_base 4: mod_base = OTHER; note = 2'-O-methylcytidine-3'-phosphate
  modified_base 5: mod_base = OTHER; note = 2'-O-methylcytidine-3'-phosphate
  modified_base 6: mod_base = OTHER; note = 2'-O-methyladenosine-3'-phosphate
  modified_base 7: mod_base = OTHER; note = 2'-O-methylguanosine-3'-phosphate
  modified_base 8: mod_base = OTHER; note = 2'-O-methylcytidine-3'-phosphate
  modified_base 9: mod_base = OTHER; note = 2'-fluorouridine-3'-phosphate
  modified_base 10: mod_base = OTHER; note = 2'-fluoroguanosine-3'-phosphate
  modified_base 11: mod_base = OTHER; note = 2'-fluoroadenosine-3'-phosphate
  modified_base 12: mod_base = OTHER; note = 2'-O-methyladenosine-3'-phosphate
  modified_base 13: mod_base = OTHER; note = 2'-O-methyluridine-3'-phosphate
  modified_base 14: mod_base = OTHER; note = 2'-O-methyluridine-3'-phosphate
  modified_base 15: mod_base = OTHER; note = 2'-O-methyladenosine-3'-phosphate
  modified_base 16: mod_base = OTHER; note = 2'-O-methylcytidine-3'-phosphate
  modified_base 17: mod_base = OTHER; note = 2'-O-methyluridine-3'-phosphate
  modified_base 18: mod_base = OTHER; note = 2'-O-methylguanosine-3'-phosphate
  modified_base 19: mod_base = OTHER; note = 2'-O-methylcytidine-3'-phosphate
  modified_base 20: mod_base = OTHER; note = 2'-O-methyladenosine-3'-phosphate
  modified_base 21: mod_base = OTHER; note = 2'-O-methyluridine-3'-phosphate N-[tris(GalNAc-alkyl)-amidodecanoyl)]-4-hydroxyprolinol (Hyp-(GalNAc-alkyl)3)
gtaccagctgaattactgcat

SEQ ID NO: 6829 - RNA, 21 nt, synthetic construct
  source 1..21: mol_type = other RNA
  modified_base 1: mod_base = OTHER; note = 2'-O-methyluridine-3'-phosphorothioate
  modified_base 2: mod_base = OTHER; note = 2'-O-methyladenosine-3'-phosphorothioate
  modified_base 3: mod_base = OTHER; note = 2'-O-methylcytidine-3'-phosphate
  modified_base 4: mod_base = OTHER; note = 2'-O-methylcytidine-3'-phosphate
  modified_base 5: mod_base = OTHER; note = 2'-O-methyladenosine-3'-phosphate
  modified_base 6: mod_base = OTHER; note = 2'-O-methylguanosine-3'-phosphate
  modified_base 7: mod_base = OTHER; note = 2'-O-methylcytidine-3'-phosphate
  modified_base 8: mod_base = OTHER; note = 2'-O-methyluridine-3'-phosphate
  modified_base 9: mod_base = OTHER; note = 2'-fluoroguanosine-3'-phosphate
  modified_base 10: mod_base = OTHER; note = 2'-fluoroadenosine-3'-phosphate
  modified_base 11: mod_base = OTHER; note = 2'-fluoroadenosine-3'-phosphate
  modified_base 12: mod_base = OTHER; note = 2'-O-methyluridine-3'-phosphate
  modified_base 13: mod_base = OTHER; note = 2'-O-methyluridine-3'-phosphate
  modified_base 14: mod_base = OTHER; note = 2'-O-methyladenosine-3'-phosphate
  modified_base 15: mod_base = OTHER; note = 2'-O-methylcytidine-3'-phosphate
  modified_base 16: mod_base = OTHER; note = 2'-O-methyluridine-3'-phosphate
  modified_base 17: mod_base = OTHER; note = 2'-O-methylguanosine-3'-phosphate
  modified_base 18: mod_base = OTHER; note = 2'-O-methylcytidine-3'-phosphate
  modified_base 19: mod_base = OTHER; note = 2'-O-methyladenosine-3'-phosphate
  modified_base 20: mod_base = OTHER; note = 2'-O-methylguanosine-3'-phosphate
  modified_base 21: mod_base = OTHER; note = 2'-O-methyluridine-3'-phosphate N-[tris(GalNAc-alkyl)-amidodecanoyl)]-4-hydroxyprolinol (Hyp-(GalNAc-alkyl)3)
taccagctgaattactgcagt

SEQ ID NO: 6830 - RNA, 21 nt, synthetic construct
  source 1..21: mol_type = other RNA
  modified_base 1: mod_base = OTHER; note = 2'-O-methyladenosine-3'-phosphorothioate
  modified_base 2: mod_base = OTHER; note = 2'-O-methylcytidine-3'-phosphorothioate
  modified_base 3: mod_base = OTHER; note = 2'-O-methylcytidine-3'-phosphate
  modified_base 4: mod_base = OTHER; note = 2'-O-methyladenosine-3'-phosphate
  modified_base 5: mod_base = OTHER; note = 2'-O-methylguanosine-3'-phosphate
  modified_base 6: mod_base = OTHER; note = 2'-O-methylcytidine-3'-phosphate
  modified_base 7: mod_base = OTHER; note = 2'-O-methyluridine-3'-phosphate
  modified_base 8: mod_base = OTHER; note = 2'-O-methylguanosine-3'-phosphate
  modified_base 9: mod_base = OTHER; note = 2'-fluoroadenosine-3'-phosphate
  modified_base 10: mod_base = OTHER; note = 2'-fluoroadenosine-3'-phosphate
  modified_base 11: mod_base = OTHER; note = 2'-fluorouridine-3'-phosphate
  modified_base 12: mod_base = OTHER; note = 2'-O-methyluridine-3'-phosphate
  modified_base 13: mod_base = OTHER; note = 2'-O-methyladenosine-3'-phosphate
  modified_base 14: mod_base = OTHER; note = 2'-O-methylcytidine-3'-phosphate
  modified_base 15: mod_base = OTHER; note = 2'-O-methyluridine-3'-phosphate
  modified_base 16: mod_base = OTHER; note = 2'-O-methylguanosine-3'-phosphate
  modified_base 17: mod_base = OTHER; note = 2'-O-methylcytidine-3'-phosphate
  modified_base 18: mod_base = OTHER; note = 2'-O-methyladenosine-3'-phosphate
  modified_base 19: mod_base = OTHER; note = 2'-O-methylguanosine-3'-phosphate
  modified_base 20: mod_base = OTHER; note = 2'-O-methyluridine-3'-phosphate
  modified_base 21: mod_base = OTHER; note = 2'-O-methyluridine-3'-phosphate N-[tris(GalNAc-alkyl)-amidodecanoyl)]-4-hydroxyprolinol (Hyp-(GalNAc-alkyl)3)
accagctgaattactgcagtt

SEQ ID NO: 6831 - RNA, 21 nt, synthetic construct
  source 1..21: mol_type = other RNA
  modified_base 1: mod_base = OTHER; note = 2'-O-methylcytidine-3'-phosphorothioate
  modified_base 2: mod_base = OTHER; note = 2'-O-methylcytidine-3'-phosphorothioate
  modified_base 3: mod_base = OTHER; note = 2'-O-methyladenosine-3'-phosphate
  modified_base 4: mod_base = OTHER; note = 2'-O-methylguanosine-3'-phosphate
  modified_base 5: mod_base = OTHER; note = 2'-O-methylcytidine-3'-phosphate
  modified_base 6: mod_base = OTHER; note = 2'-O-methyluridine-3'-phosphate
  modified_base 7: mod_base = OTHER; note = 2'-O-methylguanosine-3'-phosphate
  modified_base 8: mod_base = OTHER; note = 2'-O-methyladenosine-3'-phosphate
  modified_base 9: mod_base = OTHER; note = 2'-fluoroadenosine-3'-phosphate
  modified_base 10: mod_base = OTHER; note = 2'-fluorouridine-3'-phosphate
  modified_base 11: mod_base = OTHER; note = 2'-fluorouridine-3'-phosphate
  modified_base 12: mod_base = OTHER; note = 2'-O-methyladenosine-3'-phosphate
  modified_base 13: mod_base = OTHER; note = 2'-O-methylcytidine-3'-phosphate
  modified_base 14: mod_base = OTHER; note = 2'-O-methyluridine-3'-phosphate
  modified_base 15: mod_base = OTHER; note = 2'-O-methylguanosine-3'-phosphate
  modified_base 16: mod_base = OTHER; note = 2'-O-methylcytidine-3'-phosphate
  modified_base 17: mod_base = OTHER; note = 2'-O-methyladenosine-3'-phosphate
  modified_base 18: mod_base = OTHER; note = 2'-O-methylguanosine-3'-phosphate
  modified_base 19: mod_base = OTHER; note = 2'-O-methyluridine-3'-phosphate
  modified_base 20: mod_base = OTHER; note = 2'-O-methylguanosine-3'-phosphate
  modified_base 21: mod_base = OTHER; note = 2'-O-methyluridine-3'-phosphate N-[tris(GalNAc-alkyl)-amidodecanoyl)]-4-hydroxyprolinol (Hyp-(GalNAc-alkyl)3)
ccagctgaattactgcagtgt

SEQ ID NO: 6832 - RNA, 21 nt, synthetic construct
  source 1..21: mol_type = other RNA
  modified_base 1: mod_base = OTHER; note = 2'-O-methylcytidine-3'-phosphorothioate
  modified_base 2: mod_base = OTHER; note = 2'-O-methyladenosine-3'-phosphorothioate
  modified_base 3: mod_base = OTHER; note = 2'-O-methylguanosine-3'-phosphate
  modified_base 4: mod_base = OTHER; note = 2'-O-methylcytidine-3'-phosphate
  modified_base 5: mod_base = OTHER; note = 2'-O-methyluridine-3'-phosphate
  modified_base 6: mod_base = OTHER; note = 2'-O-methylguanosine-3'-phosphate
  modified_base 7: mod_base = OTHER; note = 2'-O-methyladenosine-3'-phosphate
  modified_base 8: mod_base = OTHER; note = 2'-O-methyladenosine-3'-phosphate
  modified_base 9: mod_base = OTHER; note = 2'-fluorouridine-3'-phosphate
  modified_base 10: mod_base = OTHER; note = 2'-fluorouridine-3'-phosphate
  modified_base 11: mod_base = OTHER; note = 2'-fluoroadenosine-3'-phosphate
  modified_base 12: mod_base = OTHER; note = 2'-O-methylcytidine-3'-phosphate
  modified_base 13: mod_base = OTHER; note = 2'-O-methyluridine-3'-phosphate
  modified_base 14: mod_base = OTHER; note = 2'-O-methylguanosine-3'-phosphate
  modified_base 15: mod_base = OTHER; note = 2'-O-methylcytidine-3'-phosphate
  modified_base 16: mod_base = OTHER; note = 2'-O-methyladenosine-3'-phosphate
  modified_base 17: mod_base = OTHER; note = 2'-O-methylguanosine-3'-phosphate
  modified_base 18: mod_base = OTHER; note = 2'-O-methyluridine-3'-phosphate
  modified_base 19: mod_base = OTHER; note = 2'-O-methylguanosine-3'-phosphate
  modified_base 20: mod_base = OTHER; note = 2'-O-methylguanosine-3'-phosphate
  modified_base 21: mod_base = OTHER; note = 2'-O-methyluridine-3'-phosphate N-[tris(GalNAc-alkyl)-amidodecanoyl)]-4-hydroxyprolinol (Hyp-(GalNAc-alkyl)3)
cagctgaattactgcagtggt

SEQ ID NO: 6833 - RNA, 21 nt, synthetic construct
  source 1..21: mol_type = other RNA
  modified_base 1: mod_base = OTHER; note = 2'-O-methyladenosine-3'-phosphorothioate
  modified_base 2: mod_base = OTHER; note = 2'-O-methylguanosine-3'-phosphorothioate
  modified_base 3: mod_base = OTHER; note = 2'-O-methylcytidine-3'-phosphate
  modified_base 4: mod_base = OTHER; note = 2'-O-methyluridine-3'-phosphate
  modified_base 5: mod_base = OTHER; note = 2'-O-methylguanosine-3'-phosphate
  modified_base 6: mod_base = OTHER; note = 2'-O-methyladenosine-3'-phosphate
  modified_base 7: mod_base = OTHER; note = 2'-O-methyladenosine-3'-phosphate
  modified_base 8: mod_base = OTHER; note = 2'-O-methyluridine-3'-phosphate
  modified_base 9: mod_base = OTHER; note = 2'-fluorouridine-3'-phosphate
  modified_base 10: mod_base = OTHER; note = 2'-fluoroadenosine-3'-phosphate
  modified_base 11: mod_base = OTHER; note = 2'-fluorocytidine-3'-phosphate
  modified_base 12: mod_base = OTHER; note = 2'-O-methyluridine-3'-phosphate
  modified_base 13: mod_base = OTHER; note = 2'-O-methylguanosine-3'-phosphate
  modified_base 14: mod_base = OTHER; note = 2'-O-methylcytidine-3'-phosphate
  modified_base 15: mod_base = OTHER; note = 2'-O-methyladenosine-3'-phosphate
  modified_base 16: mod_base = OTHER; note = 2'-O-methylguanosine-3'-phosphate
  modified_base 17: mod_base = OTHER; note = 2'-O-methyluridine-3'-phosphate
  modified_base 18: mod_base = OTHER; note = 2'-O-methylguanosine-3'-phosphate
  modified_base 19: mod_base = OTHER; note = 2'-O-methylguanosine-3'-phosphate
  modified_base 20: mod_base = OTHER; note = 2'-O-methylguanosine-3'-phosphate
  modified_base 21: mod_base = OTHER; note = 2'-O-methyluridine-3'-phosphate N-[tris(GalNAc-alkyl)-amidodecanoyl)]-4-hydroxyprolinol (Hyp-(GalNAc-alkyl)3)
agctgaattactgcagtgggt

SEQ ID NO: 6834 - RNA, 21 nt, synthetic construct
  source 1..21: mol_type = other RNA
  modified_base 1: mod_base = OTHER; note = 2'-O-methylguanosine-3'-phosphorothioate
  modified_base 2: mod_base = OTHER; note = 2'-O-methylcytidine-3'-phosphorothioate
  modified_base 3: mod_base = OTHER; note = 2'-O-methyluridine-3'-phosphate
  modified_base 4: mod_base = OTHER; note = 2'-O-methylguanosine-3'-phosphate
  modified_base 5: mod_base = OTHER; note = 2'-O-methyladenosine-3'-phosphate
  modified_base 6: mod_base = OTHER; note = 2'-O-methyladenosine-3'-phosphate
  modified_base 7: mod_base = OTHER; note = 2'-O-methyluridine-3'-phosphate
  modified_base 8: mod_base = OTHER; note = 2'-O-methyluridine-3'-phosphate
  modified_base 9: mod_base = OTHER; note = 2'-fluoroadenosine-3'-phosphate
  modified_base 10: mod_base = OTHER; note = 2'-fluorocytidine-3'-phosphate
  modified_base 11: mod_base = OTHER; note = 2'-fluorouridine-3'-phosphate
  modified_base 12: mod_base = OTHER; note = 2'-O-methylguanosine-3'-phosphate
  modified_base 13: mod_base = OTHER; note = 2'-O-methylcytidine-3'-phosphate
  modified_base 14: mod_base = OTHER; note = 2'-O-methyladenosine-3'-phosphate
  modified_base 15: mod_base = OTHER; note = 2'-O-methylguanosine-3'-phosphate
  modified_base 16: mod_base = OTHER; note = 2'-O-methyluridine-3'-phosphate
  modified_base 17: mod_base = OTHER; note = 2'-O-methylguanosine-3'-phosphate
  modified_base 18: mod_base = OTHER; note = 2'-O-methylguanosine-3'-phosphate
  modified_base 19: mod_base = OTHER; note = 2'-O-methylguanosine-3'-phosphate
  modified_base 20: mod_base = OTHER; note = 2'-O-methylcytidine-3'-phosphate
  modified_base 21: mod_base = OTHER; note = 2'-O-methyluridine-3'-phosphate N-[tris(GalNAc-alkyl)-amidodecanoyl)]-4-hydroxyprolinol (Hyp-(GalNAc-alkyl)3)
gctgaattactgcagtgggct

SEQ ID NO: 6835 - RNA, 21 nt, synthetic construct
  source 1..21: mol_type = other RNA
  modified_base 1: mod_base = OTHER; note = 2'-O-methylcytidine-3'-phosphorothioate
  modified_base 2: mod_base = OTHER; note = 2'-O-methyluridine-3'-phosphorothioate
  modified_base 3: mod_base = OTHER; note = 2'-O-methylguanosine-3'-phosphate
  modified_base 4: mod_base = OTHER; note = 2'-O-methyladenosine-3'-phosphate
  modified_base 5: mod_base = OTHER; note = 2'-O-methyladenosine-3'-phosphate
  modified_base 6: mod_base = OTHER; note = 2'-O-methyluridine-3'-phosphate
  modified_base 7: mod_base = OTHER; note = 2'-O-methyluridine-3'-phosphate
  modified_base 8: mod_base = OTHER; note = 2'-O-methyladenosine-3'-phosphate
  modified_base 9: mod_base = OTHER; note = 2'-fluorocytidine-3'-phosphate
  modified_base 10: mod_base = OTHER; note = 2'-fluorouridine-3'-phosphate
  modified_base 11: mod_base = OTHER; note = 2'-fluoroguanosine-3'-phosphate
  modified_base 12: mod_base = OTHER; note = 2'-O-methylcytidine-3'-phosphate
  modified_base 13: mod_base = OTHER; note = 2'-O-methyladenosine-3'-phosphate
  modified_base 14: mod_base = OTHER; note = 2'-O-methylguanosine-3'-phosphate
  modified_base 15: mod_base = OTHER; note = 2'-O-methyluridine-3'-phosphate
  modified_base 16: mod_base = OTHER; note = 2'-O-methylguanosine-3'-phosphate
  modified_base 17: mod_base = OTHER; note = 2'-O-methylguanosine-3'-phosphate
  modified_base 18: mod_base = OTHER; note = 2'-O-methylguanosine-3'-phosphate
  modified_base 19: mod_base = OTHER; note = 2'-O-methylcytidine-3'-phosphate
  modified_base 20: mod_base = OTHER; note = 2'-O-methyladenosine-3'-phosphate
  modified_base 21: mod_base = OTHER; note = 2'-O-methyluridine-3'-phosphate N-[tris(GalNAc-alkyl)-amidodecanoyl)]-4-hydroxyprolinol (Hyp-(GalNAc-alkyl)3)
ctgaattactgcagtgggcat

SEQ ID NO: 6836 - RNA, 21 nt, synthetic construct
  source 1..21: mol_type = other RNA
  modified_base 1: mod_base = OTHER; note = 2'-O-methyluridine-3'-phosphorothioate
  modified_base 2: mod_base = OTHER; note = 2'-O-methylguanosine-3'-phosphorothioate
  modified_base 3: mod_base = OTHER; note = 2'-O-methyladenosine-3'-phosphate
  modified_base 4: mod_base = OTHER; note = 2'-O-methyladenosine-3'-phosphate
  modified_base 5: mod_base = OTHER; note = 2'-O-methyluridine-3'-phosphate
  modified_base 6: mod_base = OTHER; note = 2'-O-methyluridine-3'-phosphate
  modified_base 7: mod_base = OTHER; note = 2'-O-methyladenosine-3'-phosphate
  modified_base 8: mod_base = OTHER; note = 2'-O-methylcytidine-3'-phosphate
  modified_base 9: mod_base = OTHER; note = 2'-fluorouridine-3'-phosphate
  modified_base 10: mod_base = OTHER; note = 2'-fluoroguanosine-3'-phosphate
  modified_base 11: mod_base = OTHER; note = 2'-fluorocytidine-3'-phosphate
  modified_base 12: mod_base = OTHER; note = 2'-O-methyladenosine-3'-phosphate
  modified_base 13: mod_base = OTHER; note = 2'-O-methylguanosine-3'-phosphate
  modified_base 14: mod_base = OTHER; note = 2'-O-methyluridine-3'-phosphate
  modified_base 15: mod_base = OTHER; note = 2'-O-methylguanosine-3'-phosphate
  modified_base 16: mod_base = OTHER; note = 2'-O-methylguanosine-3'-phosphate
  modified_base 17: mod_base = OTHER; note = 2'-O-methylguanosine-3'-phosphate
  modified_base 18: mod_base = OTHER; note = 2'-O-methylcytidine-3'-phosphate
  modified_base 19: mod_base = OTHER; note = 2'-O-methyladenosine-3'-phosphate
  modified_base 20: mod_base = OTHER; note = 2'-O-methylguanosine-3'-phosphate
  modified_base 21: mod_base = OTHER; note = 2'-O-methyluridine-3'-phosphate N-[tris(GalNAc-alkyl)-amidodecanoyl)]-4-hydroxyprolinol (Hyp-(GalNAc-alkyl)3)
tgaattactgcagtgggcagt

SEQ ID NO: 6837 - RNA, 21 nt, synthetic construct
  source 1..21: mol_type = other RNA
  modified_base 1: mod_base = OTHER; note = 2'-O-methylguanosine-3'-phosphorothioate
  modified_base 2: mod_base = OTHER; note = 2'-O-methyladenosine-3'-phosphorothioate
  modified_base 3: mod_base = OTHER; note = 2'-O-methyladenosine-3'-phosphate
  modified_base 4: mod_base = OTHER; note = 2'-O-methyluridine-3'-phosphate
  modified_base 5: mod_base = OTHER; note = 2'-O-methyluridine-3'-phosphate
  modified_base 6: mod_base = OTHER; note = 2'-O-methyladenosine-3'-phosphate
  modified_base 7: mod_base = OTHER; note = 2'-O-methylcytidine-3'-phosphate
  modified_base 8: mod_base = OTHER; note = 2'-O-methyluridine-3'-phosphate
  modified_base 9: mod_base = OTHER; note = 2'-fluoroguanosine-3'-phosphate
  modified_base 10: mod_base = OTHER; note = 2'-fluorocytidine-3'-phosphate
  modified_base 11: mod_base = OTHER; note = 2'-fluoroadenosine-3'-phosphate
  modified_base 12: mod_base = OTHER; note = 2'-O-methylguanosine-3'-phosphate
  modified_base 13: mod_base = OTHER; note = 2'-O-methyluridine-3'-phosphate
  modified_base 14: mod_base = OTHER; note = 2'-O-methylguanosine-3'-phosphate
  modified_base 15: mod_base = OTHER; note = 2'-O-methylguanosine-3'-phosphate
  modified_base 16: mod_base = OTHER; note = 2'-O-methylguanosine-3'-phosphate
  modified_base 17: mod_base = OTHER; note = 2'-O-methylcytidine-3'-phosphate
  modified_base 18: mod_base = OTHER; note = 2'-O-methyladenosine-3'-phosphate
  modified_base 19: mod_base = OTHER; note = 2'-O-methylguanosine-3'-phosphate
  modified_base 20: mod_base = OTHER; note = 2'-O-methyluridine-3'-phosphate
  modified_base 21: mod_base = OTHER; note = 2'-O-methyluridine-3'-phosphate N-[tris(GalNAc-alkyl)-amidodecanoyl)]-4-hydroxyprolinol (Hyp-(GalNAc-alkyl)3)
gaattactgcagtgggcagtt

SEQ ID NO: 6838 - RNA, 21 nt, synthetic construct
  source 1..21: mol_type = other RNA
  modified_base 1: mod_base = OTHER; note = 2'-O-methyladenosine-3'-phosphorothioate
  modified_base 2: mod_base = OTHER; note = 2'-O-methylcytidine-3'-phosphorothioate
  modified_base 3: mod_base = OTHER; note = 2'-O-methyluridine-3'-phosphate
  modified_base 4: mod_base = OTHER; note = 2'-O-methylguanosine-3'-phosphate
  modified_base 5: mod_base = OTHER; note = 2'-O-methylcytidine-3'-phosphate
  modified_base 6: mod_base = OTHER; note = 2'-O-methyladenosine-3'-phosphate
  modified_base 7: mod_base = OTHER; note = 2'-O-methylguanosine-3'-phosphate
  modified_base 8: mod_base = OTHER; note = 2'-O-methyluridine-3'-phosphate
  modified_base 9: mod_base = OTHER; note = 2'-fluoroguanosine-3'-phosphate
  modified_base 10: mod_base = OTHER; note = 2'-fluoroguanosine-3'-phosphate
  modified_base 11: mod_base = OTHER; note = 2'-fluoroguanosine-3'-phosphate
  modified_base 12: mod_base = OTHER; note = 2'-O-methylcytidine-3'-phosphate
  modified_base 13: mod_base = OTHER; note = 2'-O-methyladenosine-3'-phosphate
  modified_base 14: mod_base = OTHER; note = 2'-O-methylguanosine-3'-phosphate
  modified_base 15: mod_base = OTHER; note = 2'-O-methyluridine-3'-phosphate
  modified_base 16: mod_base = OTHER; note = 2'-O-methylguanosine-3'-phosphate
  modified_base 17: mod_base = OTHER; note = 2'-O-methylcytidine-3'-phosphate
  modified_base 18: mod_base = OTHER; note = 2'-O-methylcytidine-3'-phosphate
  modified_base 19: mod_base = OTHER; note = 2'-O-methylcytidine-3'-phosphate
  modified_base 20: mod_base = OTHER; note = 2'-O-methyluridine-3'-phosphate
  modified_base 21: mod_base = OTHER; note = 2'-O-methyluridine-3'-phosphate N-[tris(GalNAc-alkyl)-amidodecanoyl)]-4-hydroxyprolinol (Hyp-(GalNAc-alkyl)3)
actgcagtgggcagtgccctt

SEQ ID NO: 6839 - RNA, 21 nt, synthetic construct
  source 1..21: mol_type = other RNA
  modified_base 1: mod_base = OTHER; note = 2'-O-methylcytidine-3'-phosphorothioate
  modified_base 2: mod_base = OTHER; note = 2'-O-methyladenosine-3'-phosphorothioate
  modified_base 3: mod_base = OTHER; note = 2'-O-methylguanosine-3'-phosphate
  modified_base 4: mod_base = OTHER; note = 2'-O-methylguanosine-3'-phosphate
  modified_base 5: mod_base = OTHER; note = 2'-O-methylcytidine-3'-phosphate
  modified_base 6: mod_base = OTHER; note = 2'-O-methyladenosine-3'-phosphate
  modified_base 7: mod_base = OTHER; note = 2'-O-methyluridine-3'-phosphate
  modified_base 8: mod_base = OTHER; note = 2'-O-methyluridine-3'-phosphate
  modified_base 9: mod_base = OTHER; note = 2'-fluoroguanosine-3'-phosphate
  modified_base 10: mod_base = OTHER; note = 2'-fluorocytidine-3'-phosphate
  modified_base 11: mod_base = OTHER; note = 2'-fluorouridine-3'-phosphate
  modified_base 12: mod_base = OTHER; note = 2'-O-methylguanosine-3'-phosphate
  modified_base 13: mod_base = OTHER; note = 2'-O-methylcytidine-3'-phosphate
  modified_base 14: mod_base = OTHER; note = 2'-O-methylcytidine-3'-phosphate
  modified_base 15: mod_base = OTHER; note = 2'-O-methyluridine-3'-phosphate
  modified_base 16: mod_base = OTHER; note = 2'-O-methylcytidine-3'-phosphate
  modified_base 17: mod_base = OTHER; note = 2'-O-methyluridine-3'-phosphate
  modified_base 18: mod_base = OTHER; note = 2'-O-methyluridine-3'-phosphate
  modified_base 19: mod_base = OTHER; note = 2'-O-methyluridine-3'-phosphate
  modified_base 20: mod_base = OTHER; note = 2'-O-methylcytidine-3'-phosphate
  modified_base 21: mod_base = OTHER; note = 2'-O-methyluridine-3'-phosphate N-[tris(GalNAc-alkyl)-amidodecanoyl)]-4-hydroxyprolinol (Hyp-(GalNAc-alkyl)3)
caggcattgctgcctctttct

SEQ ID NO: 6840 - RNA, 21 nt, synthetic construct
  source 1..21: mol_type = other RNA
  modified_base 1: mod_base = OTHER; note = 2'-O-methyladenosine-3'-phosphorothioate
  modified_base 2: mod_base = OTHER; note = 2'-O-methylguanosine-3'-phosphorothioate
  modified_base 3: mod_base = OTHER; note = 2'-O-methylguanosine-3'-phosphate
  modified_base 4: mod_base = OTHER; note = 2'-O-methylcytidine-3'-phosphate
  modified_base 5: mod_base = OTHER; note = 2'-O-methyladenosine-3'-phosphate
  modified_base 6: mod_base = OTHER; note = 2'-O-methyluridine-3'-phosphate
  modified_base 7: mod_base = OTHER; note = 2'-O-methyluridine-3'-phosphate
  modified_base 8: mod_base = OTHER; note = 2'-O-methylguanosine-3'-phosphate
  modified_base 9: mod_base = OTHER; note = 2'-fluorocytidine-3'-phosphate
  modified_base 10: mod_base = OTHER; note = 2'-fluorouridine-3'-phosphate
  modified_base 11: mod_base = OTHER; note = 2'-fluoroguanosine-3'-phosphate
  modified_base 12: mod_base = OTHER; note = 2'-O-methylcytidine-3'-phosphate
  modified_base 13: mod_base = OTHER; note = 2'-O-methylcytidine-3'-phosphate
  modified_base 14: mod_base = OTHER; note = 2'-O-methyluridine-3'-phosphate
  modified_base 15: mod_base = OTHER; note = 2'-O-methylcytidine-3'-phosphate
  modified_base 16: mod_base = OTHER; note = 2'-O-methyluridine-3'-phosphate
  modified_base 17: mod_base = OTHER; note = 2'-O-methyluridine-3'-phosphate
  modified_base 18: mod_base = OTHER; note = 2'-O-methyluridine-3'-phosphate
  modified_base 19: mod_base = OTHER; note = 2'-O-methylcytidine-3'-phosphate
  modified_base 20: mod_base = OTHER; note = 2'-O-methylcytidine-3'-phosphate
  modified_base 21: mod_base = OTHER; note = 2'-O-methyluridine-3'-phosphate N-[tris(GalNAc-alkyl)-amidodecanoyl)]-4-hydroxyprolinol (Hyp-(GalNAc-alkyl)3)
aggcattgctgcctctttcct

SEQ ID NO: 6841 - RNA, 21 nt, synthetic construct
  source 1..21: mol_type = other RNA
  modified_base 1: mod_base = OTHER; note = 2'-O-methylguanosine-3'-phosphorothioate
  modified_base 2: mod_base = OTHER; note = 2'-O-methylguanosine-3'-phosphorothioate
  modified_base 3: mod_base = OTHER; note = 2'-O-methylcytidine-3'-phosphate
  modified_base 4: mod_base = OTHER; note = 2'-O-methyladenosine-3'-phosphate
  modified_base 5: mod_base = OTHER; note = 2'-O-methyluridine-3'-phosphate
  modified_base 6: mod_base = OTHER; note = 2'-O-methyluridine-3'-phosphate
  modified_base 7: mod_base = OTHER; note = 2'-O-methylguanosine-3'-phosphate
  modified_base 8: mod_base = OTHER; note = 2'-O-methylcytidine-3'-phosphate
  modified_base 9: mod_base = OTHER; note = 2'-fluorouridine-3'-phosphate
  modified_base 10: mod_base = OTHER; note = 2'-fluoroguanosine-3'-phosphate
  modified_base 11: mod_base = OTHER; note = 2'-fluorocytidine-3'-phosphate
  modified_base 12: mod_base = OTHER; note = 2'-O-methylcytidine-3'-phosphate
  modified_base 13: mod_base = OTHER; note = 2'-O-methyluridine-3'-phosphate
  modified_base 14: mod_base = OTHER; note = 2'-O-methylcytidine-3'-phosphate
  modified_base 15: mod_base = OTHER; note = 2'-O-methyluridine-3'-phosphate
  modified_base 16: mod_base = OTHER; note = 2'-O-methyluridine-3'-phosphate
  modified_base 17: mod_base = OTHER; note = 2'-O-methyluridine-3'-phosphate
  modified_base 18: mod_base = OTHER; note = 2'-O-methylcytidine-3'-phosphate
  modified_base 19: mod_base = OTHER; note = 2'-O-methylcytidine-3'-phosphate
  modified_base 20: mod_base = OTHER; note = 2'-O-methyladenosine-3'-phosphate
  modified_base 21: mod_base = OTHER; note = 2'-O-methyluridine-3'-phosphate N-[tris(GalNAc-alkyl)-amidodecanoyl)]-4-hydroxyprolinol (Hyp-(GalNAc-alkyl)3)
ggcattgctgcctctttccat

SEQ ID NO: 6842 - RNA, 21 nt, synthetic construct
  source 1..21: mol_type = other RNA
  modified_base 1: mod_base = OTHER; note = 2'-O-methylguanosine-3'-phosphorothioate
  modified_base 2: mod_base = OTHER; note = 2'-O-methylcytidine-3'-phosphorothioate
  modified_base 3: mod_base = OTHER; note = 2'-O-methyladenosine-3'-phosphate
  modified_base 4: mod_base = OTHER; note = 2'-O-methyluridine-3'-phosphate
  modified_base 5: mod_base = OTHER; note = 2'-O-methyluridine-3'-phosphate
  modified_base 6: mod_base = OTHER; note = 2'-O-methylguanosine-3'-phosphate
  modified_base 7: mod_base = OTHER; note = 2'-O-methylcytidine-3'-phosphate
  modified_base 8: mod_base = OTHER; note = 2'-O-methyluridine-3'-phosphate
  modified_base 9: mod_base = OTHER; note = 2'-fluoroguanosine-3'-phosphate
  modified_base 10: mod_base = OTHER; note = 2'-fluorocytidine-3'-phosphate
  modified_base 11: mod_base = OTHER; note = 2'-fluorocytidine-3'-phosphate
  modified_base 12: mod_base = OTHER; note = 2'-O-methyluridine-3'-phosphate
  modified_base 13: mod_base = OTHER; note = 2'-O-methylcytidine-3'-phosphate
  modified_base 14: mod_base = OTHER; note = 2'-O-methyluridine-3'-phosphate
  modified_base 15: mod_base = OTHER; note = 2'-O-methyluridine-3'-phosphate
  modified_base 16: mod_base = OTHER; note = 2'-O-methyluridine-3'-phosphate
  modified_base 17: mod_base = OTHER; note = 2'-O-methylcytidine-3'-phosphate
  modified_base 18: mod_base = OTHER; note = 2'-O-methylcytidine-3'-phosphate
  modified_base 19: mod_base = OTHER; note = 2'-O-methyladenosine-3'-phosphate
  modified_base 20: mod_base = OTHER; note = 2'-O-methyluridine-3'-phosphate
  modified_base 21: mod_base = OTHER; note = 2'-O-methyluridine-3'-phosphate N-[tris(GalNAc-alkyl)-amidodecanoyl)]-4-hydroxyprolinol (Hyp-(GalNAc-alkyl)3)
gcattgctgcctctttccatt

SEQ ID NO: 6843 - RNA, 21 nt, synthetic construct
  source 1..21: mol_type = other RNA
  modified_base 1: mod_base = OTHER; note = 2'-O-methylcytidine-3'-phosphorothioate
  modified_base 2: mod_base = OTHER; note = 2'-O-methyladenosine-3'-phosphorothioate
  modified_base 3: mod_base = OTHER; note = 2'-O-methyluridine-3'-phosphate
  modified_base 4: mod_base = OTHER; note = 2'-O-methyluridine-3'-phosphate
  modified_base 5: mod_base = OTHER; note = 2'-O-methylguanosine-3'-phosphate
  modified_base 6: mod_base = OTHER; note = 2'-O-methylcytidine-3'-phosphate
  modified_base 7: mod_base = OTHER; note = 2'-O-methyluridine-3'-phosphate
  modified_base 8: mod_base = OTHER; note = 2'-O-methylguanosine-3'-phosphate
  modified_base 9: mod_base = OTHER; note = 2'-fluorocytidine-3'-phosphate
  modified_base 10: mod_base = OTHER; note = 2'-fluorocytidine-3'-phosphate
  modified_base 11: mod_base = OTHER; note = 2'-fluorouridine-3'-phosphate
  modified_base 12: mod_base = OTHER; note = 2'-O-methylcytidine-3'-phosphate
  modified_base 13: mod_base = OTHER; note = 2'-O-methyluridine-3'-phosphate
  modified_base 14: mod_base = OTHER; note = 2'-O-methyluridine-3'-phosphate
  modified_base 15: mod_base = OTHER; note = 2'-O-methyluridine-3'-phosphate
  modified_base 16: mod_base = OTHER; note = 2'-O-methylcytidine-3'-phosphate
  modified_base 17: mod_base = OTHER; note = 2'-O-methylcytidine-3'-phosphate
  modified_base 18: mod_base = OTHER; note = 2'-O-methyladenosine-3'-phosphate
  modified_base 19: mod_base = OTHER; note = 2'-O-methyluridine-3'-phosphate
  modified_base 20: mod_base = OTHER; note = 2'-O-methyluridine-3'-phosphate
  modified_base 21: mod_base = OTHER; note = 2'-O-methyluridine-3'-phosphate N-[tris(GalNAc-alkyl)-amidodecanoyl)]-4-hydroxyprolinol (Hyp-(GalNAc-alkyl)3)
cattgctgcctctttccattt

SEQ ID NO: 6844 - RNA, 21 nt, synthetic construct
  source 1..21: mol_type = other RNA
  modified_base 1: mod_base = OTHER; note = 2'-O-methyladenosine-3'-phosphorothioate
  modified_base 2: mod_base = OTHER; note = 2'-O-methyluridine-3'-phosphorothioate
  modified_base 3: mod_base = OTHER; note = 2'-O-methyluridine-3'-phosphate
  modified_base 4: mod_base = OTHER; note = 2'-O-methylguanosine-3'-phosphate
  modified_base 5: mod_base = OTHER; note = 2'-O-methylcytidine-3'-phosphate
  modified_base 6: mod_base = OTHER; note = 2'-O-methyluridine-3'-phosphate
  modified_base 7: mod_base = OTHER; note = 2'-O-methylguanosine-3'-phosphate
  modified_base 8: mod_base = OTHER; note = 2'-O-methylcytidine-3'-phosphate
  modified_base 9: mod_base = OTHER; note = 2'-fluorocytidine-3'-phosphate
  modified_base 10: mod_base = OTHER; note = 2'-fluorouridine-3'-phosphate
  modified_base 11: mod_base = OTHER; note = 2'-fluorocytidine-3'-phosphate
  modified_base 12: mod_base = OTHER; note = 2'-O-methyluridine-3'-phosphate
  modified_base 13: mod_base = OTHER; note = 2'-O-methyluridine-3'-phosphate
  modified_base 14: mod_base = OTHER; note = 2'-O-methyluridine-3'-phosphate
  modified_base 15: mod_base = OTHER; note = 2'-O-methylcytidine-3'-phosphate
  modified_base 16: mod_base = OTHER; note = 2'-O-methylcytidine-3'-phosphate
  modified_base 17: mod_base = OTHER; note = 2'-O-methyladenosine-3'-phosphate
  modified_base 18: mod_base = OTHER; note = 2'-O-methyluridine-3'-phosphate
  modified_base 19: mod_base = OTHER; note = 2'-O-methyluridine-3'-phosphate
  modified_base 20: mod_base = OTHER; note = 2'-O-methylcytidine-3'-phosphate
  modified_base 21: mod_base = OTHER; note = 2'-O-methyluridine-3'-phosphate N-[tris(GalNAc-alkyl)-amidodecanoyl)]-4-hydroxyprolinol (Hyp-(GalNAc-alkyl)3)
attgctgcctctttccattct

SEQ ID NO: 6845 - RNA, 21 nt, synthetic construct
  source 1..21: mol_type = other RNA
  modified_base 1: mod_base = OTHER; note = 2'-O-methyluridine-3'-phosphorothioate
  modified_base 2: mod_base = OTHER; note = 2'-O-methyluridine-3'-phosphorothioate
  modified_base 3: mod_base = OTHER; note = 2'-O-methylguanosine-3'-phosphate
  modified_base 4: mod_base = OTHER; note = 2'-O-methylcytidine-3'-phosphate
  modified_base 5: mod_base = OTHER; note = 2'-O-methyluridine-3'-phosphate
  modified_base 6: mod_base = OTHER; note = 2'-O-methylguanosine-3'-phosphate
  modified_base 7: mod_base = OTHER; note = 2'-O-methylcytidine-3'-phosphate
  modified_base 8: mod_base = OTHER; note = 2'-O-methylcytidine-3'-phosphate
  modified_base 9: mod_base = OTHER; note = 2'-fluorouridine-3'-phosphate
  modified_base 10: mod_base = OTHER; note = 2'-fluorocytidine-3'-phosphate
  modified_base 11: mod_base = OTHER; note = 2'-fluorouridine-3'-phosphate
  modified_base 12: mod_base = OTHER; note = 2'-O-methyluridine-3'-phosphate
  modified_base 13: mod_base = OTHER; note = 2'-O-methyluridine-3'-phosphate
  modified_base 14: mod_base = OTHER; note = 2'-O-methylcytidine-3'-phosphate
  modified_base 15: mod_base = OTHER; note = 2'-O-methylcytidine-3'-phosphate
  modified_base 16: mod_base = OTHER; note = 2'-O-methyladenosine-3'-phosphate
  modified_base 17: mod_base = OTHER; note = 2'-O-methyluridine-3'-phosphate
  modified_base 18: mod_base = OTHER; note = 2'-O-methyluridine-3'-phosphate
  modified_base 19: mod_base = OTHER; note = 2'-O-methylcytidine-3'-phosphate
  modified_base 20: mod_base = OTHER; note = 2'-O-methyluridine-3'-phosphate
  modified_base 21: mod_base = OTHER; note = 2'-O-methyluridine-3'-phosphate N-[tris(GalNAc-alkyl)-amidodecanoyl)]-4-hydroxyprolinol (Hyp-(GalNAc-alkyl)3)
ttgctgcctctttccattctt

SEQ ID NO: 6846 - RNA, 21 nt, synthetic construct
  source 1..21: mol_type = other RNA
  modified_base 1: mod_base = OTHER; note = 2'-O-methyluridine-3'-phosphorothioate
  modified_base 2: mod_base = OTHER; note = 2'-O-methylguanosine-3'-phosphorothioate
  modified_base 3: mod_base = OTHER; note = 2'-O-methylcytidine-3'-phosphate
  modified_base 4: mod_base = OTHER; note = 2'-O-methyluridine-3'-phosphate
  modified_base 5: mod_base = OTHER; note = 2'-O-methylguanosine-3'-phosphate
  modified_base 6: mod_base = OTHER; note = 2'-O-methylcytidine-3'-phosphate
  modified_base 7: mod_base = OTHER; note = 2'-O-methylcytidine-3'-phosphate
  modified_base 8: mod_base = OTHER; note = 2'-O-methyluridine-3'-phosphate
  modified_base 9: mod_base = OTHER; note = 2'-fluorocytidine-3'-phosphate
  modified_base 10: mod_base = OTHER; note = 2'-fluorouridine-3'-phosphate
  modified_base 11: mod_base = OTHER; note = 2'-fluorouridine-3'-phosphate
  modified_base 12: mod_base = OTHER; note = 2'-O-methyluridine-3'-phosphate
  modified_base 13: mod_base = OTHER; note = 2'-O-methylcytidine-3'-phosphate
  modified_base 14: mod_base = OTHER; note = 2'-O-methylcytidine-3'-phosphate
  modified_base 15: mod_base = OTHER; note = 2'-O-methyladenosine-3'-phosphate
  modified_base 16: mod_base = OTHER; note = 2'-O-methyluridine-3'-phosphate
  modified_base 17: mod_base = OTHER; note = 2'-O-methyluridine-3'-phosphate
  modified_base 18: mod_base = OTHER; note = 2'-O-methylcytidine-3'-phosphate
  modified_base 19: mod_base = OTHER; note = 2'-O-methyluridine-3'-phosphate
  modified_base 20: mod_base = OTHER; note = 2'-O-methylguanosine-3'-phosphate
  modified_base 21: mod_base = OTHER; note = 2'-O-methyluridine-3'-phosphate N-[tris(GalNAc-alkyl)-amidodecanoyl)]-4-hydroxyprolinol (Hyp-(GalNAc-alkyl)3)
tgctgcctctttccattctgt

SEQ ID NO: 6847 - RNA, 21 nt, synthetic construct
  source 1..21: mol_type = other RNA
  modified_base 1: mod_base = OTHER; note = 2'-O-methylguanosine-3'-phosphorothioate
  modified_base 2: mod_base = OTHER; note = 2'-O-methylcytidine-3'-phosphorothioate
  modified_base 3: mod_base = OTHER; note = 2'-O-methyluridine-3'-phosphate
  modified_base 4: mod_base = OTHER; note = 2'-O-methylguanosine-3'-phosphate
  modified_base 5: mod_base = OTHER; note = 2'-O-methylcytidine-3'-phosphate
  modified_base 6: mod_base = OTHER; note = 2'-O-methylcytidine-3'-phosphate
  modified_base 7: mod_base = OTHER; note = 2'-O-methyluridine-3'-phosphate
  modified_base 8: mod_base = OTHER; note = 2'-O-methylcytidine-3'-phosphate
  modified_base 9: mod_base = OTHER; note = 2'-fluorouridine-3'-phosphate
  modified_base 10: mod_base = OTHER; note = 2'-fluorouridine-3'-phosphate
  modified_base 11: mod_base = OTHER; note = 2'-fluorouridine-3'-phosphate
  modified_base 12: mod_base = OTHER; note = 2'-O-methylcytidine-3'-phosphate
  modified_base 13: mod_base = OTHER; note = 2'-O-methylcytidine-3'-phosphate
  modified_base 14: mod_base = OTHER; note = 2'-O-methyladenosine-3'-phosphate
  modified_base 15: mod_base = OTHER; note = 2'-O-methyluridine-3'-phosphate
  modified_base 16: mod_base = OTHER; note = 2'-O-methyluridine-3'-phosphate
  modified_base 17: mod_base = OTHER; note = 2'-O-methylcytidine-3'-phosphate
  modified_base 18: mod_base = OTHER; note = 2'-O-methyluridine-3'-phosphate
  modified_base 19: mod_base = OTHER; note = 2'-O-methylguanosine-3'-phosphate
  modified_base 20: mod_base = OTHER; note = 2'-O-methylcytidine-3'-phosphate
  modified_base 21: mod_base = OTHER; note = 2'-O-methyluridine-3'-phosphate N-[tris(GalNAc-alkyl)-amidodecanoyl)]-4-hydroxyprolinol (Hyp-(GalNAc-alkyl)3)
gctgcctctttccattctgct

SEQ ID NO: 6848 - RNA, 21 nt, synthetic construct
  source 1..21: mol_type = other RNA
  modified_base 1: mod_base = OTHER; note = 2'-O-methylcytidine-3'-phosphorothioate
  modified_base 2: mod_base = OTHER; note = 2'-O-methyluridine-3'-phosphorothioate
  modified_base 3: mod_base = OTHER; note = 2'-O-methylguanosine-3'-phosphate
  modified_base 4: mod_base = OTHER; note = 2'-O-methylcytidine-3'-phosphate
  modified_base 5: mod_base = OTHER; note = 2'-O-methylcytidine-3'-phosphate
  modified_base 6: mod_base = OTHER; note = 2'-O-methyluridine-3'-phosphate
  modified_base 7: mod_base = OTHER; note = 2'-O-methylcytidine-3'-phosphate
  modified_base 8: mod_base = OTHER; note = 2'-O-methyluridine-3'-phosphate
  modified_base 9: mod_base = OTHER; note = 2'-fluorouridine-3'-phosphate
  modified_base 10: mod_base = OTHER; note = 2'-fluorouridine-3'-phosphate
  modified_base 11: mod_base = OTHER; note = 2'-fluorocytidine-3'-phosphate
  modified_base 12: mod_base = OTHER; note = 2'-O-methylcytidine-3'-phosphate
  modified_base 13: mod_base = OTHER; note = 2'-O-methyladenosine-3'-phosphate
  modified_base 14: mod_base = OTHER; note = 2'-O-methyluridine-3'-phosphate
  modified_base 15: mod_base = OTHER; note = 2'-O-methyluridine-3'-phosphate
  modified_base 16: mod_base = OTHER; note = 2'-O-methylcytidine-3'-phosphate
  modified_base 17: mod_base = OTHER; note = 2'-O-methyluridine-3'-phosphate
  modified_base 18: mod_base = OTHER; note = 2'-O-methylguanosine-3'-phosphate
  modified_base 19: mod_base = OTHER; note = 2'-O-methylcytidine-3'-phosphate
  modified_base 20: mod_base = OTHER; note = 2'-O-methylcytidine-3'-phosphate
  modified_base 21: mod_base = OTHER; note = 2'-O-methyluridine-3'-phosphate N-[tris(GalNAc-alkyl)-amidodecanoyl)]-4-hydroxyprolinol (Hyp-(GalNAc-alkyl)3)
ctgcctctttccattctgcct

SEQ ID NO: 6849 - RNA, 21 nt, synthetic construct
  source 1..21: mol_type = other RNA
  modified_base 1: mod_base = OTHER; note = 2'-O-methyluridine-3'-phosphorothioate
  modified_base 2: mod_base = OTHER; note = 2'-O-methylguanosine-3'-phosphorothioate
  modified_base 3: mod_base = OTHER; note = 2'-O-methylcytidine-3'-phosphate
  modified_base 4: mod_base = OTHER; note = 2'-O-methylcytidine-3'-phosphate
  modified_base 5: mod_base = OTHER; note = 2'-O-methyluridine-3'-phosphate
  modified_base 6: mod_base = OTHER; note = 2'-O-methylcytidine-3'-phosphate
  modified_base 7: mod_base = OTHER; note = 2'-O-methyluridine-3'-phosphate
  modified_base 8: mod_base = OTHER; note = 2'-O-methyluridine-3'-phosphate
  modified_base 9: mod_base = OTHER; note = 2'-fluorouridine-3'-phosphate
  modified_base 10: mod_base = OTHER; note = 2'-fluorocytidine-3'-phosphate
  modified_base 11: mod_base = OTHER; note = 2'-fluorocytidine-3'-phosphate
  modified_base 12: mod_base = OTHER; note = 2'-O-methyladenosine-3'-phosphate
  modified_base 13: mod_base = OTHER; note = 2'-O-methyluridine-3'-phosphate
  modified_base 14: mod_base = OTHER; note = 2'-O-methyluridine-3'-phosphate
  modified_base 15: mod_base = OTHER; note = 2'-O-methylcytidine-3'-phosphate
  modified_base 16: mod_base = OTHER; note = 2'-O-methyluridine-3'-phosphate
  modified_base 17: mod_base = OTHER; note = 2'-O-methylguanosine-3'-phosphate
  modified_base 18: mod_base = OTHER; note = 2'-O-methylcytidine-3'-phosphate
  modified_base 19: mod_base = OTHER; note = 2'-O-methylcytidine-3'-phosphate
  modified_base 20: mod_base = OTHER; note = 2'-O-methylguanosine-3'-phosphate
  modified_base 21: mod_base = OTHER; note = 2'-O-methyluridine-3'-phosphate N-[tris(GalNAc-alkyl)-amidodecanoyl)]-4-hydroxyprolinol (Hyp-(GalNAc-alkyl)3)
tgcctctttccattctgccgt

SEQ ID NO: 6850 - RNA, 21 nt, synthetic construct
  source 1..21: mol_type = other RNA
  modified_base 1: mod_base = OTHER; note = 2'-O-methylguanosine-3'-phosphorothioate
  modified_base 2: mod_base = OTHER; note = 2'-O-methylcytidine-3'-phosphorothioate
  modified_base 3: mod_base = OTHER; note = 2'-O-methylcytidine-3'-phosphate
  modified_base 4: mod_base = OTHER; note = 2'-O-methyluridine-3'-phosphate
  modified_base 5: mod_base = OTHER; note = 2'-O-methylcytidine-3'-phosphate
  modified_base 6: mod_base = OTHER; note = 2'-O-methyluridine-3'-phosphate
  modified_base 7: mod_base = OTHER; note = 2'-O-methyluridine-3'-phosphate
  modified_base 8: mod_base = OTHER; note = 2'-O-methyluridine-3'-phosphate
  modified_base 9: mod_base = OTHER; note = 2'-fluorocytidine-3'-phosphate
  modified_base 10: mod_base = OTHER; note = 2'-fluorocytidine-3'-phosphate
  modified_base 11: mod_base = OTHER; note = 2'-fluoroadenosine-3'-phosphate
  modified_base 12: mod_base = OTHER; note = 2'-O-methyluridine-3'-phosphate
  modified_base 13: mod_base = OTHER; note = 2'-O-methyluridine-3'-phosphate
  modified_base 14: mod_base = OTHER; note = 2'-O-methylcytidine-3'-phosphate
  modified_base 15: mod_base = OTHER; note = 2'-O-methyluridine-3'-phosphate
  modified_base 16: mod_base = OTHER; note = 2'-O-methylguanosine-3'-phosphate
  modified_base 17: mod_base = OTHER; note = 2'-O-methylcytidine-3'-phosphate
  modified_base 18: mod_base = OTHER; note = 2'-O-methylcytidine-3'-phosphate
  modified_base 19: mod_base = OTHER; note = 2'-O-methylguanosine-3'-phosphate
  modified_base 20: mod_base = OTHER; note = 2'-O-methyluridine-3'-phosphate
  modified_base 21: mod_base = OTHER; note = 2'-O-methyluridine-3'-phosphate N-[tris(GalNAc-alkyl)-amidodecanoyl)]-4-hydroxyprolinol (Hyp-(GalNAc-alkyl)3)
gcctctttccattctgccgtt

SEQ ID NO: 6851 - RNA, 21 nt, synthetic construct
  source 1..21: mol_type = other RNA
  modified_base 1: mod_base = OTHER; note = 2'-O-methylcytidine-3'-phosphorothioate
  modified_base 2: mod_base = OTHER; note = 2'-O-methylcytidine-3'-phosphorothioate
  modified_base 3: mod_base = OTHER; note = 2'-O-methyluridine-3'-phosphate
  modified_base 4: mod_base = OTHER; note = 2'-O-methylcytidine-3'-phosphate
  modified_base 5: mod_base = OTHER; note = 2'-O-methyluridine-3'-phosphate
  modified_base 6: mod_base = OTHER; note = 2'-O-methyluridine-3'-phosphate
  modified_base 7: mod_base = OTHER; note = 2'-O-methyluridine-3'-phosphate
  modified_base 8: mod_base = OTHER; note = 2'-O-methylcytidine-3'-phosphate
  modified_base 9: mod_base = OTHER; note = 2'-fluorocytidine-3'-phosphate
  modified_base 10: mod_base = OTHER; note = 2'-fluoroadenosine-3'-phosphate
  modified_base 11: mod_base = OTHER; note = 2'-fluorouridine-3'-phosphate
  modified_base 12: mod_base = OTHER; note = 2'-O-methyluridine-3'-phosphate
  modified_base 13: mod_base = OTHER; note = 2'-O-methylcytidine-3'-phosphate
  modified_base 14: mod_base = OTHER; note = 2'-O-methyluridine-3'-phosphate
  modified_base 15: mod_base = OTHER; note = 2'-O-methylguanosine-3'-phosphate
  modified_base 16: mod_base = OTHER; note = 2'-O-methylcytidine-3'-phosphate
  modified_base 17: mod_base = OTHER; note = 2'-O-methylcytidine-3'-phosphate
  modified_base 18: mod_base = OTHER; note = 2'-O-methylguanosine-3'-phosphate
  modified_base 19: mod_base = OTHER; note = 2'-O-methyluridine-3'-phosphate
  modified_base 20: mod_base = OTHER; note = 2'-O-methylcytidine-3'-phosphate
  modified_base 21: mod_base = OTHER; note = 2'-O-methyluridine-3'-phosphate N-[tris(GalNAc-alkyl)-amidodecanoyl)]-4-hydroxyprolinol (Hyp-(GalNAc-alkyl)3)
cctctttccattctgccgtct

SEQ ID NO: 6852 - RNA, 21 nt, synthetic construct
  source 1..21: mol_type = other RNA
  modified_base 1: mod_base = OTHER; note = 2'-O-methylcytidine-3'-phosphorothioate
  modified_base 2: mod_base = OTHER; note = 2'-O-methyluridine-3'-phosphorothioate
  modified_base 3: mod_base = OTHER; note = 2'-O-methylcytidine-3'-phosphate
  modified_base 4: mod_base = OTHER; note = 2'-O-methyluridine-3'-phosphate
  modified_base 5: mod_base = OTHER; note = 2'-O-methyluridine-3'-phosphate
  modified_base 6: mod_base = OTHER; note = 2'-O-methyluridine-3'-phosphate
  modified_base 7: mod_base = OTHER; note = 2'-O-methylcytidine-3'-phosphate
  modified_base 8: mod_base = OTHER; note = 2'-O-methylcytidine-3'-phosphate
  modified_base 9: mod_base = OTHER; note = 2'-fluoroadenosine-3'-phosphate
  modified_base 10: mod_base = OTHER; note = 2'-fluorouridine-3'-phosphate
  modified_base 11: mod_base = OTHER; note = 2'-fluorouridine-3'-phosphate
  modified_base 12: mod_base = OTHER; note = 2'-O-methylcytidine-3'-phosphate
  modified_base 13: mod_base = OTHER; note = 2'-O-methyluridine-3'-phosphate
  modified_base 14: mod_base = OTHER; note = 2'-O-methylguanosine-3'-phosphate
  modified_base 15: mod_base = OTHER; note = 2'-O-methylcytidine-3'-phosphate
  modified_base 16: mod_base = OTHER; note = 2'-O-methylcytidine-3'-phosphate
  modified_base 17: mod_base = OTHER; note = 2'-O-methylguanosine-3'-phosphate
  modified_base 18: mod_base = OTHER; note = 2'-O-methyluridine-3'-phosphate
  modified_base 19: mod_base = OTHER; note = 2'-O-methylcytidine-3'-phosphate
  modified_base 20: mod_base = OTHER; note = 2'-O-methyluridine-3'-phosphate
  modified_base 21: mod_base = OTHER; note = 2'-O-methyluridine-3'-phosphate N-[tris(GalNAc-alkyl)-amidodecanoyl)]-4-hydroxyprolinol (Hyp-(GalNAc-alkyl)3)
ctctttccattctgccgtctt

SEQ ID NO: 6853 - RNA, 21 nt, synthetic construct
  source 1..21: mol_type = other RNA
  modified_base 1: mod_base = OTHER; note = 2'-O-methyluridine-3'-phosphorothioate
  modified_base 2: mod_base = OTHER; note = 2'-O-methylcytidine-3'-phosphorothioate
  modified_base 3: mod_base = OTHER; note = 2'-O-methyluridine-3'-phosphate
  modified_base 4: mod_base = OTHER; note = 2'-O-methyluridine-3'-phosphate
  modified_base 5: mod_base = OTHER; note = 2'-O-methyluridine-3'-phosphate
  modified_base 6: mod_base = OTHER; note = 2'-O-methylcytidine-3'-phosphate
  modified_base 7: mod_base = OTHER; note = 2'-O-methylcytidine-3'-phosphate
  modified_base 8: mod_base = OTHER; note = 2'-O-methyladenosine-3'-phosphate
  modified_base 9: mod_base = OTHER; note = 2'-fluorouridine-3'-phosphate
  modified_base 10: mod_base = OTHER; note = 2'-fluorouridine-3'-phosphate
  modified_base 11: mod_base = OTHER; note = 2'-fluorocytidine-3'-phosphate
  modified_base 12: mod_base = OTHER; note = 2'-O-methyluridine-3'-phosphate
  modified_base 13: mod_base = OTHER; note = 2'-O-methylguanosine-3'-phosphate
  modified_base 14: mod_base = OTHER; note = 2'-O-methylcytidine-3'-phosphate
  modified_base 15: mod_base = OTHER; note = 2'-O-methylcytidine-3'-phosphate
  modified_base 16: mod_base = OTHER; note = 2'-O-methylguanosine-3'-phosphate
  modified_base 17: mod_base = OTHER; note = 2'-O-methyluridine-3'-phosphate
  modified_base 18: mod_base = OTHER; note = 2'-O-methylcytidine-3'-phosphate
  modified_base 19: mod_base = OTHER; note = 2'-O-methyluridine-3'-phosphate
  modified_base 20: mod_base = OTHER; note = 2'-O-methyluridine-3'-phosphate
  modified_base 21: mod_base = OTHER; note = 2'-O-methyluridine-3'-phosphate N-[tris(GalNAc-alkyl)-amidodecanoyl)]-4-hydroxyprolinol (Hyp-(GalNAc-alkyl)3)
tctttccattctgccgtcttt

SEQ ID NO: 6854 - RNA, 21 nt, synthetic construct
  source 1..21: mol_type = other RNA
  modified_base 1: mod_base = OTHER; note = 2'-O-methylcytidine-3'-phosphorothioate
  modified_base 2: mod_base = OTHER; note = 2'-O-methyluridine-3'-phosphorothioate
  modified_base 3: mod_base = OTHER; note = 2'-O-methyluridine-3'-phosphate
  modified_base 4: mod_base = OTHER; note = 2'-O-methyluridine-3'-phosphate
  modified_base 5: mod_base = OTHER; note = 2'-O-methylcytidine-3'-phosphate
  modified_base 6: mod_base = OTHER; note = 2'-O-methylcytidine-3'-phosphate
  modified_base 7: mod_base = OTHER; note = 2'-O-methyladenosine-3'-phosphate
  modified_base 8: mod_base = OTHER; note = 2'-O-methyluridine-3'-phosphate
  modified_base 9: mod_base = OTHER; note = 2'-fluorouridine-3'-phosphate
  modified_base 10: mod_base = OTHER; note = 2'-fluorocytidine-3'-phosphate
  modified_base 11: mod_base = OTHER; note = 2'-fluorouridine-3'-phosphate
  modified_base 12: mod_base = OTHER; note = 2'-O-methylguanosine-3'-phosphate
  modified_base 13: mod_base = OTHER; note = 2'-O-methylcytidine-3'-phosphate
  modified_base 14: mod_base = OTHER; note = 2'-O-methylcytidine-3'-phosphate
  modified_base 15: mod_base = OTHER; note = 2'-O-methylguanosine-3'-phosphate
  modified_base 16: mod_base = OTHER; note = 2'-O-methyluridine-3'-phosphate
  modified_base 17: mod_base = OTHER; note = 2'-O-methylcytidine-3'-phosphate
  modified_base 18: mod_base = OTHER; note = 2'-O-methyluridine-3'-phosphate
  modified_base 19: mod_base = OTHER; note = 2'-O-methyluridine-3'-phosphate
  modified_base 20: mod_base = OTHER; note = 2'-O-methylcytidine-3'-phosphate
  modified_base 21: mod_base = OTHER; note = 2'-O-methyluridine-3'-phosphate N-[tris(GalNAc-alkyl)-amidodecanoyl)]-4-hydroxyprolinol (Hyp-(GalNAc-alkyl)3)
ctttccattctgccgtcttct

SEQ ID NO: 6855 - RNA, 21 nt, synthetic construct
  source 1..21: mol_type = other RNA
  modified_base 1: mod_base = OTHER; note = 2'-O-methyluridine-3'-phosphorothioate
  modified_base 2: mod_base = OTHER; note = 2'-O-methyluridine-3'-phosphorothioate
  modified_base 3: mod_base = OTHER; note = 2'-O-methyluridine-3'-phosphate
  modified_base 4: mod_base = OTHER; note = 2'-O-methylcytidine-3'-phosphate
  modified_base 5: mod_base = OTHER; note = 2'-O-methylcytidine-3'-phosphate
  modified_base 6: mod_base = OTHER; note = 2'-O-methyladenosine-3'-phosphate
  modified_base 7: mod_base = OTHER; note = 2'-O-methyluridine-3'-phosphate
  modified_base 8: mod_base = OTHER; note = 2'-O-methyluridine-3'-phosphate
  modified_base 9: mod_base = OTHER; note = 2'-fluorocytidine-3'-phosphate
  modified_base 10: mod_base = OTHER; note = 2'-fluorouridine-3'-phosphate
  modified_base 11: mod_base = OTHER; note = 2'-fluoroguanosine-3'-phosphate
  modified_base 12: mod_base = OTHER; note = 2'-O-methylcytidine-3'-phosphate
  modified_base 13: mod_base = OTHER; note = 2'-O-methylcytidine-3'-phosphate
  modified_base 14: mod_base = OTHER; note = 2'-O-methylguanosine-3'-phosphate
  modified_base 15: mod_base = OTHER; note = 2'-O-methyluridine-3'-phosphate
  modified_base 16: mod_base = OTHER; note = 2'-O-methylcytidine-3'-phosphate
  modified_base 17: mod_base = OTHER; note = 2'-O-methyluridine-3'-phosphate
  modified_base 18: mod_base = OTHER; note = 2'-O-methyluridine-3'-phosphate
  modified_base 19: mod_base = OTHER; note = 2'-O-methylcytidine-3'-phosphate
  modified_base 20: mod_base = OTHER; note = 2'-O-methyladenosine-3'-phosphate
  modified_base 21: mod_base = OTHER; note = 2'-O-methyluridine-3'-phosphate N-[tris(GalNAc-alkyl)-amidodecanoyl)]-4-hydroxyprolinol (Hyp-(GalNAc-alkyl)3)
tttccattctgccgtcttcat

SEQ ID NO: 6856 - RNA, 21 nt, synthetic construct
  source 1..21: mol_type = other RNA
  modified_base 1: mod_base = OTHER; note = 2'-O-methyluridine-3'-phosphorothioate
  modified_base 2: mod_base = OTHER; note = 2'-O-methyluridine-3'-phosphorothioate
  modified_base 3: mod_base = OTHER; note = 2'-O-methylcytidine-3'-phosphate
  modified_base 4: mod_base = OTHER; note = 2'-O-methylcytidine-3'-phosphate
  modified_base 5: mod_base = OTHER; note = 2'-O-methyladenosine-3'-phosphate
  modified_base 6: mod_base = OTHER; note = 2'-O-methyluridine-3'-phosphate
  modified_base 7: mod_base = OTHER; note = 2'-O-methyluridine-3'-phosphate
  modified_base 8: mod_base = OTHER; note = 2'-O-methylcytidine-3'-phosphate
  modified_base 9: mod_base = OTHER; note = 2'-fluorouridine-3'-phosphate
  modified_base 10: mod_base = OTHER; note = 2'-fluoroguanosine-3'-phosphate
  modified_base 11: mod_base = OTHER; note = 2'-fluorocytidine-3'-phosphate
  modified_base 12: mod_base = OTHER; note = 2'-O-methylcytidine-3'-phosphate
  modified_base 13: mod_base = OTHER; note = 2'-O-methylguanosine-3'-phosphate
  modified_base 14: mod_base = OTHER; note = 2'-O-methyluridine-3'-phosphate
  modified_base 15: mod_base = OTHER; note = 2'-O-methylcytidine-3'-phosphate
  modified_base 16: mod_base = OTHER; note = 2'-O-methyluridine-3'-phosphate
  modified_base 17: mod_base = OTHER; note = 2'-O-methyluridine-3'-phosphate
  modified_base 18: mod_base = OTHER; note = 2'-O-methylcytidine-3'-phosphate
  modified_base 19: mod_base = OTHER; note = 2'-O-methyladenosine-3'-phosphate
  modified_base 20: mod_base = OTHER; note = 2'-O-methylguanosine-3'-phosphate
  modified_base 21: mod_base = OTHER; note = 2'-O-methyluridine-3'-phosphate N-[tris(GalNAc-alkyl)-amidodecanoyl)]-4-hydroxyprolinol (Hyp-(GalNAc-alkyl)3)
ttccattctgccgtcttcagt

SEQ ID NO: 6857 - RNA, 21 nt, synthetic construct
  source 1..21: mol_type = other RNA
  modified_base 1: mod_base = OTHER; note = 2'-O-methyluridine-3'-phosphorothioate
  modified_base 2: mod_base = OTHER; note = 2'-O-methylcytidine-3'-phosphorothioate
  modified_base 3: mod_base = OTHER; note = 2'-O-methylcytidine-3'-phosphate
  modified_base 4: mod_base = OTHER; note = 2'-O-methyladenosine-3'-phosphate
  modified_base 5: mod_base = OTHER; note = 2'-O-methyluridine-3'-phosphate
  modified_base 6: mod_base = OTHER; note = 2'-O-methyluridine-3'-phosphate
  modified_base 7: mod_base = OTHER; note = 2'-O-methylcytidine-3'-phosphate
  modified_base 8: mod_base = OTHER; note = 2'-O-methyluridine-3'-phosphate
  modified_base 9: mod_base = OTHER; note = 2'-fluoroguanosine-3'-phosphate
  modified_base 10: mod_base = OTHER; note = 2'-fluorocytidine-3'-phosphate
  modified_base 11: mod_base = OTHER; note = 2'-fluorocytidine-3'-phosphate
  modified_base 12: mod_base = OTHER; note = 2'-O-methylguanosine-3'-phosphate
  modified_base 13: mod_base = OTHER; note = 2'-O-methyluridine-3'-phosphate
  modified_base 14: mod_base = OTHER; note = 2'-O-methylcytidine-3'-phosphate
  modified_base 15: mod_base = OTHER; note = 2'-O-methyluridine-3'-phosphate
  modified_base 16: mod_base = OTHER; note = 2'-O-methyluridine-3'-phosphate
  modified_base 17: mod_base = OTHER; note = 2'-O-methylcytidine-3'-phosphate
  modified_base 18: mod_base = OTHER; note = 2'-O-methyladenosine-3'-phosphate
  modified_base 19: mod_base = OTHER; note = 2'-O-methylguanosine-3'-phosphate
  modified_base 20: mod_base = OTHER; note = 2'-O-methylcytidine-3'-phosphate
  modified_base 21: mod_base = OTHER; note = 2'-O-methyluridine-3'-phosphate N-[tris(GalNAc-alkyl)-amidodecanoyl)]-4-hydroxyprolinol (Hyp-(GalNAc-alkyl)3)
tccattctgccgtcttcagct

SEQ ID NO: 6858 - RNA, 21 nt, synthetic construct
  source 1..21: mol_type = other RNA
  modified_base 1: mod_base = OTHER; note = 2'-O-methylcytidine-3'-phosphorothioate
  modified_base 2: mod_base = OTHER; note = 2'-O-methylcytidine-3'-phosphorothioate
  modified_base 3: mod_base = OTHER; note = 2'-O-methyladenosine-3'-phosphate
  modified_base 4: mod_base = OTHER; note = 2'-O-methyluridine-3'-phosphate
  modified_base 5: mod_base = OTHER; note = 2'-O-methyluridine-3'-phosphate
  modified_base 6: mod_base = OTHER; note = 2'-O-methylcytidine-3'-phosphate
  modified_base 7: mod_base = OTHER; note = 2'-O-methyluridine-3'-phosphate
  modified_base 8: mod_base = OTHER; note = 2'-O-methylguanosine-3'-phosphate
  modified_base 9: mod_base = OTHER; note = 2'-fluorocytidine-3'-phosphate
  modified_base 10: mod_base = OTHER; note = 2'-fluorocytidine-3'-phosphate
  modified_base 11: mod_base = OTHER; note = 2'-fluoroguanosine-3'-phosphate
  modified_base 12: mod_base = OTHER; note = 2'-O-methyluridine-3'-phosphate
  modified_base 13: mod_base = OTHER; note = 2'-O-methylcytidine-3'-phosphate
  modified_base 14: mod_base = OTHER; note = 2'-O-methyluridine-3'-phosphate
  modified_base 15: mod_base = OTHER; note = 2'-O-methyluridine-3'-phosphate
  modified_base 16: mod_base = OTHER; note = 2'-O-methylcytidine-3'-phosphate
  modified_base 17: mod_base = OTHER; note = 2'-O-methyladenosine-3'-phosphate
  modified_base 18: mod_base = OTHER; note = 2'-O-methylguanosine-3'-phosphate
  modified_base 19: mod_base = OTHER; note = 2'-O-methylcytidine-3'-phosphate
  modified_base 20: mod_base = OTHER; note = 2'-O-methylcytidine-3'-phosphate
  modified_base 21: mod_base = OTHER; note = 2'-O-methyluridine-3'-phosphate N-[tris(GalNAc-alkyl)-amidodecanoyl)]-4-hydroxyprolinol (Hyp-(GalNAc-alkyl)3)
ccattctgccgtcttcagcct

SEQ ID NO: 6859 - RNA, 21 nt, synthetic construct
  source 1..21: mol_type = other RNA
  modified_base 1: mod_base = OTHER; note = 2'-O-methylcytidine-3'-phosphorothioate
  modified_base 2: mod_base = OTHER; note = 2'-O-methyladenosine-3'-phosphorothioate
  modified_base 3: mod_base = OTHER; note = 2'-O-methyluridine-3'-phosphate
  modified_base 4: mod_base = OTHER; note = 2'-O-methyluridine-3'-phosphate
  modified_base 5: mod_base = OTHER; note = 2'-O-methylcytidine-3'-phosphate
  modified_base 6: mod_base = OTHER; note = 2'-O-methyluridine-3'-phosphate
  modified_base 7: mod_base = OTHER; note = 2'-O-methylguanosine-3'-phosphate
  modified_base 8: mod_base = OTHER; note = 2'-O-methylcytidine-3'-phosphate
  modified_base 9: mod_base = OTHER; note = 2'-fluorocytidine-3'-phosphate
  modified_base 10: mod_base = OTHER; note = 2'-fluoroguanosine-3'-phosphate
  modified_base 11: mod_base = OTHER; note = 2'-fluorouridine-3'-phosphate
  modified_base 12: mod_base = OTHER; note = 2'-O-methylcytidine-3'-phosphate
  modified_base 13: mod_base = OTHER; note = 2'-O-methyluridine-3'-phosphate
  modified_base 14: mod_base = OTHER; note = 2'-O-methyluridine-3'-phosphate
  modified_base 15: mod_base = OTHER; note = 2'-O-methylcytidine-3'-phosphate
  modified_base 16: mod_base = OTHER; note = 2'-O-methyladenosine-3'-phosphate
  modified_base 17: mod_base = OTHER; note = 2'-O-methylguanosine-3'-phosphate
  modified_base 18: mod_base = OTHER; note = 2'-O-methylcytidine-3'-phosphate
  modified_base 19: mod_base = OTHER; note = 2'-O-methylcytidine-3'-phosphate
  modified_base 20: mod_base = OTHER; note = 2'-O-methyluridine-3'-phosphate
  modified_base 21: mod_base = OTHER; note = 2'-O-methyluridine-3'-phosphate N-[tris(GalNAc-alkyl)-amidodecanoyl)]-4-hydroxyprolinol (Hyp-(GalNAc-alkyl)3)
cattctgccgtcttcagcctt

SEQ ID NO: 6860 - RNA, 21 nt, synthetic construct
  source 1..21: mol_type = other RNA
  modified_base 1: mod_base = OTHER; note = 2'-O-methyluridine-3'-phosphorothioate
  modified_base 2: mod_base = OTHER; note = 2'-O-methylcytidine-3'-phosphorothioate
  modified_base 3: mod_base = OTHER; note = 2'-O-methyluridine-3'-phosphate
  modified_base 4: mod_base = OTHER; note = 2'-O-methylguanosine-3'-phosphate
  modified_base 5: mod_base = OTHER; note = 2'-O-methylcytidine-3'-phosphate
  modified_base 6: mod_base = OTHER; note = 2'-O-methylcytidine-3'-phosphate
  modified_base 7: mod_base = OTHER; note = 2'-O-methylguanosine-3'-phosphate
  modified_base 8: mod_base = OTHER; note = 2'-O-methyluridine-3'-phosphate
  modified_base 9: mod_base = OTHER; note = 2'-fluorocytidine-3'-phosphate
  modified_base 10: mod_base = OTHER; note = 2'-fluorouridine-3'-phosphate
  modified_base 11: mod_base = OTHER; note = 2'-fluorouridine-3'-phosphate
  modified_base 12: mod_base = OTHER; note = 2'-O-methylcytidine-3'-phosphate
  modified_base 13: mod_base = OTHER; note = 2'-O-methyladenosine-3'-phosphate
  modified_base 14: mod_base = OTHER; note = 2'-O-methylguanosine-3'-phosphate
  modified_base 15: mod_base = OTHER; note = 2'-O-methylcytidine-3'-phosphate
  modified_base 16: mod_base = OTHER; note = 2'-O-methylcytidine-3'-phosphate
  modified_base 17: mod_base = OTHER; note = 2'-O-methyluridine-3'-phosphate
  modified_base 18: mod_base = OTHER; note = 2'-O-methylcytidine-3'-phosphate
  modified_base 19: mod_base = OTHER; note = 2'-O-methylcytidine-3'-phosphate
  modified_base 20: mod_base = OTHER; note = 2'-O-methyluridine-3'-phosphate
  modified_base 21: mod_base = OTHER; note = 2'-O-methyluridine-3'-phosphate N-[tris(GalNAc-alkyl)-amidodecanoyl)]-4-hydroxyprolinol (Hyp-(GalNAc-alkyl)3)
tctgccgtcttcagcctcctt

SEQ ID NO: 6861 - RNA, 21 nt, synthetic construct
  source 1..21: mol_type = other RNA
  modified_base 1: mod_base = OTHER; note = 2'-O-methylcytidine-3'-phosphorothioate
  modified_base 2: mod_base = OTHER; note = 2'-O-methylcytidine-3'-phosphorothioate
  modified_base 3: mod_base = OTHER; note = 2'-O-methylguanosine-3'-phosphate
  modified_base 4: mod_base = OTHER; note = 2'-O-methyluridine-3'-phosphate
  modified_base 5: mod_base = OTHER; note = 2'-O-methylcytidine-3'-phosphate
  modified_base 6: mod_base = OTHER; note = 2'-O-methyluridine-3'-phosphate
  modified_base 7: mod_base = OTHER; note = 2'-O-methyluridine-3'-phosphate
  modified_base 8: mod_base = OTHER; note = 2'-O-methylcytidine-3'-phosphate
  modified_base 9: mod_base = OTHER; note = 2'-fluoroadenosine-3'-phosphate
  modified_base 10: mod_base = OTHER; note = 2'-fluoroguanosine-3'-phosphate
  modified_base 11: mod_base = OTHER; note = 2'-fluorocytidine-3'-phosphate
  modified_base 12: mod_base = OTHER; note = 2'-O-methylcytidine-3'-phosphate
  modified_base 13: mod_base = OTHER; note = 2'-O-methyluridine-3'-phosphate
  modified_base 14: mod_base = OTHER; note = 2'-O-methylcytidine-3'-phosphate
  modified_base 15: mod_base = OTHER; note = 2'-O-methylcytidine-3'-phosphate
  modified_base 16: mod_base = OTHER; note = 2'-O-methyluridine-3'-phosphate
  modified_base 17: mod_base = OTHER; note = 2'-O-methylcytidine-3'-phosphate
  modified_base 18: mod_base = OTHER; note = 2'-O-methyladenosine-3'-phosphate
  modified_base 19: mod_base = OTHER; note = 2'-O-methyladenosine-3'-phosphate
  modified_base 20: mod_base = OTHER; note = 2'-O-methyladenosine-3'-phosphate
  modified_base 21: mod_base = OTHER; note = 2'-O-methyluridine-3'-phosphate N-[tris(GalNAc-alkyl)-amidodecanoyl)]-4-hydroxyprolinol (Hyp-(GalNAc-alkyl)3)
ccgtcttcagcctcctcaaat

SEQ ID NO: 6862 - RNA, 21 nt, synthetic construct
  source 1..21: mol_type = other RNA
  modified_base 1: mod_base = OTHER; note = 2'-O-methylcytidine-3'-phosphorothioate
  modified_base 2: mod_base = OTHER; note = 2'-O-methylguanosine-3'-phosphorothioate
  modified_base 3: mod_base = OTHER; note = 2'-O-methyluridine-3'-phosphate
  modified_base 4: mod_base = OTHER; note = 2'-O-methylcytidine-3'-phosphate
  modified_base 5: mod_base = OTHER; note = 2'-O-methyluridine-3'-phosphate
  modified_base 6: mod_base = OTHER; note = 2'-O-methyluridine-3'-phosphate
  modified_base 7: mod_base = OTHER; note = 2'-O-methylcytidine-3'-phosphate
  modified_base 8: mod_base = OTHER; note = 2'-O-methyladenosine-3'-phosphate
  modified_base 9: mod_base = OTHER; note = 2'-fluoroguanosine-3'-phosphate
  modified_base 10: mod_base = OTHER; note = 2'-fluorocytidine-3'-phosphate
  modified_base 11: mod_base = OTHER; note = 2'-fluorocytidine-3'-phosphate
  modified_base 12: mod_base = OTHER; note = 2'-O-methyluridine-3'-phosphate
  modified_base 13: mod_base = OTHER; note = 2'-O-methylcytidine-3'-phosphate
  modified_base 14: mod_base = OTHER; note = 2'-O-methylcytidine-3'-phosphate
  modified_base 15: mod_base = OTHER; note = 2'-O-methyluridine-3'-phosphate
  modified_base 16: mod_base = OTHER; note = 2'-O-methylcytidine-3'-phosphate
  modified_base 17: mod_base = OTHER; note = 2'-O-methyladenosine-3'-phosphate
  modified_base 18: mod_base = OTHER; note = 2'-O-methyladenosine-3'-phosphate
  modified_base 19: mod_base = OTHER; note = 2'-O-methyladenosine-3'-phosphate
  modified_base 20: mod_base = OTHER; note = 2'-O-methylguanosine-3'-phosphate
  modified_base 21: mod_base = OTHER; note = 2'-O-methyluridine-3'-phosphate N-[tris(GalNAc-alkyl)-amidodecanoyl)]-4-hydroxyprolinol (Hyp-(GalNAc-alkyl)3)
cgtcttcagcctcctcaaagt

SEQ ID NO: 6863 - RNA, 21 nt, synthetic construct
  source 1..21: mol_type = other RNA
  modified_base 1: mod_base = OTHER; note = 2'-O-methylguanosine-3'-phosphorothioate
  modified_base 2: mod_base = OTHER; note = 2'-O-methyluridine-3'-phosphorothioate
  modified_base 3: mod_base = OTHER; note = 2'-O-methylcytidine-3'-phosphate
  modified_base 4: mod_base = OTHER; note = 2'-O-methyluridine-3'-phosphate
  modified_base 5: mod_base = OTHER; note = 2'-O-methyluridine-3'-phosphate
  modified_base 6: mod_base = OTHER; note = 2'-O-methylcytidine-3'-phosphate
  modified_base 7: mod_base = OTHER; note = 2'-O-methyladenosine-3'-phosphate
  modified_base 8: mod_base = OTHER; note = 2'-O-methylguanosine-3'-phosphate
  modified_base 9: mod_base = OTHER; note = 2'-fluorocytidine-3'-phosphate
  modified_base 10: mod_base = OTHER; note = 2'-fluorocytidine-3'-phosphate
  modified_base 11: mod_base = OTHER; note = 2'-fluorouridine-3'-phosphate
  modified_base 12: mod_base = OTHER; note = 2'-O-methylcytidine-3'-phosphate
  modified_base 13: mod_base = OTHER; note = 2'-O-methylcytidine-3'-phosphate
  modified_base 14: mod_base = OTHER; note = 2'-O-methyluridine-3'-phosphate
  modified_base 15: mod_base = OTHER; note = 2'-O-methylcytidine-3'-phosphate
  modified_base 16: mod_base = OTHER; note = 2'-O-methyladenosine-3'-phosphate
  modified_base 17: mod_base = OTHER; note = 2'-O-methyladenosine-3'-phosphate
  modified_base 18: mod_base = OTHER; note = 2'-O-methyladenosine-3'-phosphate
  modified_base 19: mod_base = OTHER; note = 2'-O-methylguanosine-3'-phosphate
  modified_base 20: mod_base = OTHER; note = 2'-O-methylcytidine-3'-phosphate
  modified_base 21: mod_base = OTHER; note = 2'-O-methyluridine-3'-phosphate N-[tris(GalNAc-alkyl)-amidodecanoyl)]-4-hydroxyprolinol (Hyp-(GalNAc-alkyl)3)
gtcttcagcctcctcaaagct

SEQ ID NO: 6864 - RNA, 21 nt, synthetic construct
  source 1..21: mol_type = other RNA
  modified_base 1: mod_base = OTHER; note = 2'-O-methyluridine-3'-phosphorothioate
  modified_base 2: mod_base = OTHER; note = 2'-O-methylcytidine-3'-phosphorothioate
  modified_base 3: mod_base = OTHER; note = 2'-O-methyluridine-3'-phosphate
  modified_base 4: mod_base = OTHER; note = 2'-O-methyluridine-3'-phosphate
  modified_base 5: mod_base = OTHER; note = 2'-O-methylcytidine-3'-phosphate
  modified_base 6: mod_base = OTHER; note = 2'-O-methyladenosine-3'-phosphate
  modified_base 7: mod_base = OTHER; note = 2'-O-methylguanosine-3'-phosphate
  modified_base 8: mod_base = OTHER; note = 2'-O-methylcytidine-3'-phosphate
  modified_base 9: mod_base = OTHER; note = 2'-fluorocytidine-3'-phosphate
  modified_base 10: mod_base = OTHER; note = 2'-fluorouridine-3'-phosphate
  modified_base 11: mod_base = OTHER; note = 2'-fluorocytidine-3'-phosphate
  modified_base 12: mod_base = OTHER; note = 2'-O-methylcytidine-3'-phosphate
  modified_base 13: mod_base = OTHER; note = 2'-O-methyluridine-3'-phosphate
  modified_base 14: mod_base = OTHER; note = 2'-O-methylcytidine-3'-phosphate
  modified_base 15: mod_base = OTHER; note = 2'-O-methyladenosine-3'-phosphate
  modified_base 16: mod_base = OTHER; note = 2'-O-methyladenosine-3'-phosphate
  modified_base 17: mod_base = OTHER; note = 2'-O-methyladenosine-3'-phosphate
  modified_base 18: mod_base = OTHER; note = 2'-O-methylguanosine-3'-phosphate
  modified_base 19: mod_base = OTHER; note = 2'-O-methylcytidine-3'-phosphate
  modified_base 20: mod_base = OTHER; note = 2'-O-methylcytidine-3'-phosphate
  modified_base 21: mod_base = OTHER; note = 2'-O-methyluridine-3'-phosphate N-[tris(GalNAc-alkyl)-amidodecanoyl)]-4-hydroxyprolinol (Hyp-(GalNAc-alkyl)3)
tcttcagcctcctcaaagcct

SEQ ID NO: 6865 - RNA, 21 nt, synthetic construct
  source 1..21: mol_type = other RNA
  modified_base 1: mod_base = OTHER; note = 2'-O-methylcytidine-3'-phosphorothioate
  modified_base 2: mod_base = OTHER; note = 2'-O-methyluridine-3'-phosphorothioate
  modified_base 3: mod_base = OTHER; note = 2'-O-methyluridine-3'-phosphate
  modified_base 4: mod_base = OTHER; note = 2'-O-methylcytidine-3'-phosphate
  modified_base 5: mod_base = OTHER; note = 2'-O-methyladenosine-3'-phosphate
  modified_base 6: mod_base = OTHER; note = 2'-O-methylguanosine-3'-phosphate
  modified_base 7: mod_base = OTHER; note = 2'-O-methylcytidine-3'-phosphate
  modified_base 8: mod_base = OTHER; note = 2'-O-methylcytidine-3'-phosphate
  modified_base 9: mod_base = OTHER; note = 2'-fluorouridine-3'-phosphate
  modified_base 10: mod_base = OTHER; note = 2'-fluorocytidine-3'-phosphate
  modified_base 11: mod_base = OTHER; note = 2'-fluorocytidine-3'-phosphate
  modified_base 12: mod_base = OTHER; note = 2'-O-methyluridine-3'-phosphate
  modified_base 13: mod_base = OTHER; note = 2'-O-methylcytidine-3'-phosphate
  modified_base 14: mod_base = OTHER; note = 2'-O-methyladenosine-3'-phosphate
  modified_base 15: mod_base = OTHER; note = 2'-O-methyladenosine-3'-phosphate
  modified_base 16: mod_base = OTHER; note = 2'-O-methyladenosine-3'-phosphate
  modified_base 17: mod_base = OTHER; note = 2'-O-methylguanosine-3'-phosphate
  modified_base 18: mod_base = OTHER; note = 2'-O-methylcytidine-3'-phosphate
  modified_base 19: mod_base = OTHER; note = 2'-O-methylcytidine-3'-phosphate
  modified_base 20: mod_base = OTHER; note = 2'-O-methyladenosine-3'-phosphate
  modified_base 21: mod_base = OTHER; note = 2'-O-methyluridine-3'-phosphate N-[tris(GalNAc-alkyl)-amidodecanoyl)]-4-hydroxyprolinol (Hyp-(GalNAc-alkyl)3)
cttcagcctcctcaaagccat

SEQ ID NO: 6866 - RNA, 21 nt, synthetic construct
  source 1..21: mol_type = other RNA
  modified_base 1: mod_base = OTHER; note = 2'-O-methyluridine-3'-phosphorothioate
  modified_base 2: mod_base = OTHER; note = 2'-O-methylcytidine-3'-phosphorothioate
  modified_base 3: mod_base = OTHER; note = 2'-O-methyladenosine-3'-phosphate
  modified_base 4: mod_base = OTHER; note = 2'-O-methylguanosine-3'-phosphate
  modified_base 5: mod_base = OTHER; note = 2'-O-methylcytidine-3'-phosphate
  modified_base 6: mod_base = OTHER; note = 2'-O-methylcytidine-3'-phosphate
  modified_base 7: mod_base = OTHER; note = 2'-O-methyluridine-3'-phosphate
  modified_base 8: mod_base = OTHER; note = 2'-O-methylcytidine-3'-phosphate
  modified_base 9: mod_base = OTHER; note = 2'-fluorocytidine-3'-phosphate
  modified_base 10: mod_base = OTHER; note = 2'-fluorouridine-3'-phosphate
  modified_base 11: mod_base = OTHER; note = 2'-fluorocytidine-3'-phosphate
  modified_base 12: mod_base = OTHER; note = 2'-O-methyladenosine-3'-phosphate
  modified_base 13: mod_base = OTHER; note = 2'-O-methyladenosine-3'-phosphate
  modified_base 14: mod_base = OTHER; note = 2'-O-methyladenosine-3'-phosphate
  modified_base 15: mod_base = OTHER; note = 2'-O-methylguanosine-3'-phosphate
  modified_base 16: mod_base = OTHER; note = 2'-O-methylcytidine-3'-phosphate
  modified_base 17: mod_base = OTHER; note = 2'-O-methylcytidine-3'-phosphate
  modified_base 18: mod_base = OTHER; note = 2'-O-methyladenosine-3'-phosphate
  modified_base 19: mod_base = OTHER; note = 2'-O-methyladenosine-3'-phosphate
  modified_base 20: mod_base = OTHER; note = 2'-O-methylcytidine-3'-phosphate
  modified_base 21: mod_base = OTHER; note = 2'-O-methyluridine-3'-phosphate N-[tris(GalNAc-alkyl)-amidodecanoyl)]-4-hydroxyprolinol (Hyp-(GalNAc-alkyl)3)
tcagcctcctcaaagccaact

SEQ ID NO: 6867 - RNA, 21 nt, synthetic construct
  source 1..21: mol_type = other RNA
  modified_base 1: mod_base = OTHER; note = 2'-O-methylcytidine-3'-phosphorothioate
  modified_base 2: mod_base = OTHER; note = 2'-O-methyladenosine-3'-phosphorothioate
  modified_base 3: mod_base = OTHER; note = 2'-O-methylguanosine-3'-phosphate
  modified_base 4: mod_base = OTHER; note = 2'-O-methylcytidine-3'-phosphate
  modified_base 5: mod_base = OTHER; note = 2'-O-methylcytidine-3'-phosphate
  modified_base 6: mod_base = OTHER; note = 2'-O-methyluridine-3'-phosphate
  modified_base 7: mod_base = OTHER; note = 2'-O-methylcytidine-3'-phosphate
  modified_base 8: mod_base = OTHER; note = 2'-O-methylcytidine-3'-phosphate
  modified_base 9: mod_base = OTHER; note = 2'-fluorouridine-3'-phosphate
  modified_base 10: mod_base = OTHER; note = 2'-fluorocytidine-3'-phosphate
  modified_base 11: mod_base = OTHER; note = 2'-fluoroadenosine-3'-phosphate
  modified_base 12: mod_base = OTHER; note = 2'-O-methyladenosine-3'-phosphate
  modified_base 13: mod_base = OTHER; note = 2'-O-methyladenosine-3'-phosphate
  modified_base 14: mod_base = OTHER; note = 2'-O-methylguanosine-3'-phosphate
  modified_base 15: mod_base = OTHER; note = 2'-O-methylcytidine-3'-phosphate
  modified_base 16: mod_base = OTHER; note = 2'-O-methylcytidine-3'-phosphate
  modified_base 17: mod_base = OTHER; note = 2'-O-methyladenosine-3'-phosphate
  modified_base 18: mod_base = OTHER; note = 2'-O-methyladenosine-3'-phosphate
  modified_base 19: mod_base = OTHER; note = 2'-O-methylcytidine-3'-phosphate
  modified_base 20: mod_base = OTHER; note = 2'-O-methyladenosine-3'-phosphate
  modified_base 21: mod_base = OTHER; note = 2'-O-methyluridine-3'-phosphate N-[tris(GalNAc-alkyl)-amidodecanoyl)]-4-hydroxyprolinol (Hyp-(GalNAc-alkyl)3)
cagcctcctcaaagccaacat

SEQ ID NO: 6868 - RNA, 21 nt, synthetic construct
  source 1..21: mol_type = other RNA
  modified_base 1: mod_base = OTHER; note = 2'-O-methyladenosine-3'-phosphorothioate
  modified_base 2: mod_base = OTHER; note = 2'-O-methylguanosine-3'-phosphorothioate
  modified_base 3: mod_base = OTHER; note = 2'-O-methylcytidine-3'-phosphate
  modified_base 4: mod_base = OTHER; note = 2'-O-methylcytidine-3'-phosphate
  modified_base 5: mod_base = OTHER; note = 2'-O-methyluridine-3'-phosphate
  modified_base 6: mod_base = OTHER; note = 2'-O-methylcytidine-3'-phosphate
  modified_base 7: mod_base = OTHER; note = 2'-O-methylcytidine-3'-phosphate
  modified_base 8: mod_base = OTHER; note = 2'-O-methyluridine-3'-phosphate
  modified_base 9: mod_base = OTHER; note = 2'-fluorocytidine-3'-phosphate
  modified_base 10: mod_base = OTHER; note = 2'-fluoroadenosine-3'-phosphate
  modified_base 11: mod_base = OTHER; note = 2'-fluoroadenosine-3'-phosphate
  modified_base 12: mod_base = OTHER; note = 2'-O-methyladenosine-3'-phosphate
  modified_base 13: mod_base = OTHER; note = 2'-O-methylguanosine-3'-phosphate
  modified_base 14: mod_base = OTHER; note = 2'-O-methylcytidine-3'-phosphate
  modified_base 15: mod_base = OTHER; note = 2'-O-methylcytidine-3'-phosphate
  modified_base 16: mod_base = OTHER; note = 2'-O-methyladenosine-3'-phosphate
  modified_base 17: mod_base = OTHER; note = 2'-O-methyladenosine-3'-phosphate
  modified_base 18: mod_base = OTHER; note = 2'-O-methylcytidine-3'-phosphate
  modified_base 19: mod_base = OTHER; note = 2'-O-methyladenosine-3'-phosphate
  modified_base 20: mod_base = OTHER; note = 2'-O-methyladenosine-3'-phosphate
  modified_base 21: mod_base = OTHER; note = 2'-O-methyluridine-3'-phosphate N-[tris(GalNAc-alkyl)-amidodecanoyl)]-4-hydroxyprolinol (Hyp-(GalNAc-alkyl)3)
agcctcctcaaagccaacaat

SEQ ID NO: 6869 - RNA, 21 nt, synthetic construct
  source 1..21: mol_type = other RNA
  modified_base 1: mod_base = OTHER; note = 2'-O-methylguanosine-3'-phosphorothioate
  modified_base 2: mod_base = OTHER; note = 2'-O-methylcytidine-3'-phosphorothioate
  modified_base 3: mod_base = OTHER; note = 2'-O-methylcytidine-3'-phosphate
  modified_base 4: mod_base = OTHER; note = 2'-O-methyluridine-3'-phosphate
  modified_base 5: mod_base = OTHER; note = 2'-O-methylcytidine-3'-phosphate
  modified_base 6: mod_base = OTHER; note = 2'-O-methylcytidine-3'-phosphate
  modified_base 7: mod_base = OTHER; note = 2'-O-methyluridine-3'-phosphate
  modified_base 8: mod_base = OTHER; note = 2'-O-methylcytidine-3'-phosphate
  modified_base 9: mod_base = OTHER; note = 2'-fluoroadenosine-3'-phosphate
  modified_base 10: mod_base = OTHER; note = 2'-fluoroadenosine-3'-phosphate
  modified_base 11: mod_base = OTHER; note = 2'-fluoroadenosine-3'-phosphate
  modified_base 12: mod_base = OTHER; note = 2'-O-methylguanosine-3'-phosphate
  modified_base 13: mod_base = OTHER; note = 2'-O-methylcytidine-3'-phosphate
  modified_base 14: mod_base = OTHER; note = 2'-O-methylcytidine-3'-phosphate
  modified_base 15: mod_base = OTHER; note = 2'-O-methyladenosine-3'-phosphate
  modified_base 16: mod_base = OTHER; note = 2'-O-methyladenosine-3'-phosphate
  modified_base 17: mod_base = OTHER; note = 2'-O-methylcytidine-3'-phosphate
  modified_base 18: mod_base = OTHER; note = 2'-O-methyladenosine-3'-phosphate
  modified_base 19: mod_base = OTHER; note = 2'-O-methyladenosine-3'-phosphate
  modified_base 20: mod_base = OTHER; note = 2'-O-methyluridine-3'-phosphate
  modified_base 21: mod_base = OTHER; note = 2'-O-methyluridine-3'-phosphate N-[tris(GalNAc-alkyl)-amidodecanoyl)]-4-hydroxyprolinol (Hyp-(GalNAc-alkyl)3)
gcctcctcaaagccaacaatt

SEQ ID NO: 6870 - RNA, 21 nt, synthetic construct
  source 1..21: mol_type = other RNA
  modified_base 1: mod_base = OTHER; note = 2'-O-methylcytidine-3'-phosphorothioate
  modified_base 2: mod_base = OTHER; note = 2'-O-methylcytidine-3'-phosphorothioate
  modified_base 3: mod_base = OTHER; note = 2'-O-methyluridine-3'-phosphate
  modified_base 4: mod_base = OTHER; note = 2'-O-methylcytidine-3'-phosphate
  modified_base 5: mod_base = OTHER; note = 2'-O-methylcytidine-3'-phosphate
  modified_base 6: mod_base = OTHER; note = 2'-O-methyluridine-3'-phosphate
  modified_base 7: mod_base = OTHER; note = 2'-O-methylcytidine-3'-phosphate
  modified_base 8: mod_base = OTHER; note = 2'-O-methyladenosine-3'-phosphate
  modified_base 9: mod_base = OTHER; note = 2'-fluoroadenosine-3'-phosphate
  modified_base 10: mod_base = OTHER; note = 2'-fluoroadenosine-3'-phosphate
  modified_base 11: mod_base = OTHER; note = 2'-fluoroguanosine-3'-phosphate
  modified_base 12: mod_base = OTHER; note = 2'-O-methylcytidine-3'-phosphate
  modified_base 13: mod_base = OTHER; note = 2'-O-methylcytidine-3'-phosphate
  modified_base 14: mod_base = OTHER; note = 2'-O-methyladenosine-3'-phosphate
  modified_base 15: mod_base = OTHER; note = 2'-O-methyladenosine-3'-phosphate
  modified_base 16: mod_base = OTHER; note = 2'-O-methylcytidine-3'-phosphate
  modified_base 17: mod_base = OTHER; note = 2'-O-methyladenosine-3'-phosphate
  modified_base 18: mod_base = OTHER; note = 2'-O-methyladenosine-3'-phosphate
  modified_base 19: mod_base = OTHER; note = 2'-O-methyluridine-3'-phosphate
  modified_base 20: mod_base = OTHER; note = 2'-O-methylcytidine-3'-phosphate
  modified_base 21: mod_base = OTHER; note = 2'-O-methyluridine-3'-phosphate N-[tris(GalNAc-alkyl)-amidodecanoyl)]-4-hydroxyprolinol (Hyp-(GalNAc-alkyl)3)
cctcctcaaagccaacaatct

SEQ ID NO: 6871 - RNA, 21 nt, synthetic construct
  source 1..21: mol_type = other RNA
  modified_base 1: mod_base = OTHER; note = 2'-O-methylcytidine-3'-phosphorothioate
  modified_base 2: mod_base = OTHER; note = 2'-O-methyluridine-3'-phosphorothioate
  modified_base 3: mod_base = OTHER; note = 2'-O-methylcytidine-3'-phosphate
  modified_base 4: mod_base = OTHER; note = 2'-O-methylcytidine-3'-phosphate
  modified_base 5: mod_base = OTHER; note = 2'-O-methyluridine-3'-phosphate
  modified_base 6: mod_base = OTHER; note = 2'-O-methylcytidine-3'-phosphate
  modified_base 7: mod_base = OTHER; note = 2'-O-methyladenosine-3'-phosphate
  modified_base 8: mod_base = OTHER; note = 2'-O-methyladenosine-3'-phosphate
  modified_base 9: mod_base = OTHER; note = 2'-fluoroadenosine-3'-phosphate
  modified_base 10: mod_base = OTHER; note = 2'-fluoroguanosine-3'-phosphate
  modified_base 11: mod_base = OTHER; note = 2'-fluorocytidine-3'-phosphate
  modified_base 12: mod_base = OTHER; note = 2'-O-methylcytidine-3'-phosphate
  modified_base 13: mod_base = OTHER; note = 2'-O-methyladenosine-3'-phosphate
  modified_base 14: mod_base = OTHER; note = 2'-O-methyladenosine-3'-phosphate
  modified_base 15: mod_base = OTHER; note = 2'-O-methylcytidine-3'-phosphate
  modified_base 16: mod_base = OTHER; note = 2'-O-methyladenosine-3'-phosphate
  modified_base 17: mod_base = OTHER; note = 2'-O-methyladenosine-3'-phosphate
  modified_base 18: mod_base = OTHER; note = 2'-O-methyluridine-3'-phosphate
  modified_base 19: mod_base = OTHER; note = 2'-O-methylcytidine-3'-phosphate
  modified_base 20: mod_base = OTHER; note = 2'-O-methylcytidine-3'-phosphate
  modified_base 21: mod_base = OTHER; note = 2'-O-methyluridine-3'-phosphate N-[tris(GalNAc-alkyl)-amidodecanoyl)]-4-hydroxyprolinol (Hyp-(GalNAc-alkyl)3)
ctcctcaaagccaacaatcct

SEQ ID NO: 6872 - RNA, 21 nt, synthetic construct
  source 1..21: mol_type = other RNA
  modified_base 1: mod_base = OTHER; note = 2'-O-methyluridine-3'-phosphorothioate
  modified_base 2: mod_base = OTHER; note = 2'-O-methylcytidine-3'-phosphorothioate
  modified_base 3: mod_base = OTHER; note = 2'-O-methylcytidine-3'-phosphate
  modified_base 4: mod_base = OTHER; note = 2'-O-methyluridine-3'-phosphate
  modified_base 5: mod_base = OTHER; note = 2'-O-methylcytidine-3'-phosphate
  modified_base 6: mod_base = OTHER; note = 2'-O-methyladenosine-3'-phosphate
  modified_base 7: mod_base = OTHER; note = 2'-O-methyladenosine-3'-phosphate
  modified_base 8: mod_base = OTHER; note = 2'-O-methyladenosine-3'-phosphate
  modified_base 9: mod_base = OTHER; note = 2'-fluoroguanosine-3'-phosphate
  modified_base 10: mod_base = OTHER; note = 2'-fluorocytidine-3'-phosphate
  modified_base 11: mod_base = OTHER; note = 2'-fluorocytidine-3'-phosphate
  modified_base 12: mod_base = OTHER; note = 2'-O-methyladenosine-3'-phosphate
  modified_base 13: mod_base = OTHER; note = 2'-O-methyladenosine-3'-phosphate
  modified_base 14: mod_base = OTHER; note = 2'-O-methylcytidine-3'-phosphate
  modified_base 15: mod_base = OTHER; note = 2'-O-methyladenosine-3'-phosphate
  modified_base 16: mod_base = OTHER; note = 2'-O-methyladenosine-3'-phosphate
  modified_base 17: mod_base = OTHER; note = 2'-O-methyluridine-3'-phosphate
  modified_base 18: mod_base = OTHER; note = 2'-O-methylcytidine-3'-phosphate
  modified_base 19: mod_base = OTHER; note = 2'-O-methylcytidine-3'-phosphate
  modified_base 20: mod_base = OTHER; note = 2'-O-methyluridine-3'-phosphate
  modified_base 21: mod_base = OTHER; note = 2'-O-methyluridine-3'-phosphate N-[tris(GalNAc-alkyl)-amidodecanoyl)]-4-hydroxyprolinol (Hyp-(GalNAc-alkyl)3)
tcctcaaagccaacaatcctt

SEQ ID NO: 6873 - RNA, 21 nt, synthetic construct
  source 1..21: mol_type = other RNA
  modified_base 1: mod_base = OTHER; note = 2'-O-methylcytidine-3'-phosphorothioate
  modified_base 2: mod_base = OTHER; note = 2'-O-methylcytidine-3'-phosphorothioate
  modified_base 3: mod_base = OTHER; note = 2'-O-methyluridine-3'-phosphate
  modified_base 4: mod_base = OTHER; note = 2'-O-methylcytidine-3'-phosphate
  modified_base 5: mod_base = OTHER; note = 2'-O-methyladenosine-3'-phosphate
  modified_base 6: mod_base = OTHER; note = 2'-O-methyladenosine-3'-phosphate
  modified_base 7: mod_base = OTHER; note = 2'-O-methyladenosine-3'-phosphate
  modified_base 8: mod_base = OTHER; note = 2'-O-methylguanosine-3'-phosphate
  modified_base 9: mod_base = OTHER; note = 2'-fluorocytidine-3'-phosphate
  modified_base 10: mod_base = OTHER; note = 2'-fluorocytidine-3'-phosphate
  modified_base 11: mod_base = OTHER; note = 2'-fluoroadenosine-3'-phosphate
  modified_base 12: mod_base = OTHER; note = 2'-O-methyladenosine-3'-phosphate
  modified_base 13: mod_base = OTHER; note = 2'-O-methylcytidine-3'-phosphate
  modified_base 14: mod_base = OTHER; note = 2'-O-methyladenosine-3'-phosphate
  modified_base 15: mod_base = OTHER; note = 2'-O-methyladenosine-3'-phosphate
  modified_base 16: mod_base = OTHER; note = 2'-O-methyluridine-3'-phosphate
  modified_base 17: mod_base = OTHER; note = 2'-O-methylcytidine-3'-phosphate
  modified_base 18: mod_base = OTHER; note = 2'-O-methylcytidine-3'-phosphate
  modified_base 19: mod_base = OTHER; note = 2'-O-methyluridine-3'-phosphate
  modified_base 20: mod_base = OTHER; note = 2'-O-methyluridine-3'-phosphate
  modified_base 21: mod_base = OTHER; note = 2'-O-methyluridine-3'-phosphate N-[tris(GalNAc-alkyl)-amidodecanoyl)]-4-hydroxyprolinol (Hyp-(GalNAc-alkyl)3)
cctcaaagccaacaatccttt

SEQ ID NO: 6874 - RNA, 21 nt, synthetic construct
  source 1..21: mol_type = other RNA
  modified_base 1: mod_base = OTHER; note = 2'-O-methylcytidine-3'-phosphorothioate
  modified_base 2: mod_base = OTHER; note = 2'-O-methyluridine-3'-phosphorothioate
  modified_base 3: mod_base = OTHER; note = 2'-O-methylcytidine-3'-phosphate
  modified_base 4: mod_base = OTHER; note = 2'-O-methyladenosine-3'-phosphate
  modified_base 5: mod_base = OTHER; note = 2'-O-methyladenosine-3'-phosphate
  modified_base 6: mod_base = OTHER; note = 2'-O-methyladenosine-3'-phosphate
  modified_base 7: mod_base = OTHER; note = 2'-O-methylguanosine-3'-phosphate
  modified_base 8: mod_base = OTHER; note = 2'-O-methylcytidine-3'-phosphate
  modified_base 9: mod_base = OTHER; note = 2'-fluorocytidine-3'-phosphate
  modified_base 10: mod_base = OTHER; note = 2'-fluoroadenosine-3'-phosphate
  modified_base 11: mod_base = OTHER; note = 2'-fluoroadenosine-3'-phosphate
  modified_base 12: mod_base = OTHER; note = 2'-O-methylcytidine-3'-phosphate
  modified_base 13: mod_base = OTHER; note = 2'-O-methyladenosine-3'-phosphate
  modified_base 14: mod_base = OTHER; note = 2'-O-methyladenosine-3'-phosphate
  modified_base 15: mod_base = OTHER; note = 2'-O-methyluridine-3'-phosphate
  modified_base 16: mod_base = OTHER; note = 2'-O-methylcytidine-3'-phosphate
  modified_base 17: mod_base = OTHER; note = 2'-O-methylcytidine-3'-phosphate
  modified_base 18: mod_base = OTHER; note = 2'-O-methyluridine-3'-phosphate
  modified_base 19: mod_base = OTHER; note = 2'-O-methyluridine-3'-phosphate
  modified_base 20: mod_base = OTHER; note = 2'-O-methylguanosine-3'-phosphate
  modified_base 21: mod_base = OTHER; note = 2'-O-methyluridine-3'-phosphate N-[tris(GalNAc-alkyl)-amidodecanoyl)]-4-hydroxyprolinol (Hyp-(GalNAc-alkyl)3)
ctcaaagccaacaatccttgt

SEQ ID NO: 6875 - RNA, 21 nt, synthetic construct
  source 1..21: mol_type = other RNA
  modified_base 1: mod_base = OTHER; note = 2'-O-methyladenosine-3'-phosphorothioate
  modified_base 2: mod_base = OTHER; note = 2'-O-methyladenosine-3'-phosphorothioate
  modified_base 3: mod_base = OTHER; note = 2'-O-methylguanosine-3'-phosphate
  modified_base 4: mod_base = OTHER; note = 2'-O-methylcytidine-3'-phosphate
  modified_base 5: mod_base = OTHER; note = 2'-O-methylcytidine-3'-phosphate
  modified_base 6: mod_base = OTHER; note = 2'-O-methyladenosine-3'-phosphate
  modified_base 7: mod_base = OTHER; note = 2'-O-methyladenosine-3'-phosphate
  modified_base 8: mod_base = OTHER; note = 2'-O-methylcytidine-3'-phosphate
  modified_base 9: mod_base = OTHER; note = 2'-fluoroadenosine-3'-phosphate
  modified_base 10: mod_base = OTHER; note = 2'-fluoroadenosine-3'-phosphate
  modified_base 11: mod_base = OTHER; note = 2'-fluorouridine-3'-phosphate
  modified_base 12: mod_base = OTHER; note = 2'-O-methylcytidine-3'-phosphate
  modified_base 13: mod_base = OTHER; note = 2'-O-methylcytidine-3'-phosphate
  modified_base 14: mod_base = OTHER; note = 2'-O-methyluridine-3'-phosphate
  modified_base 15: mod_base = OTHER; note = 2'-O-methyluridine-3'-phosphate
  modified_base 16: mod_base = OTHER; note = 2'-O-methylguanosine-3'-phosphate
  modified_base 17: mod_base = OTHER; note = 2'-O-methylguanosine-3'-phosphate
  modified_base 18: mod_base = OTHER; note = 2'-O-methylcytidine-3'-phosphate
  modified_base 19: mod_base = OTHER; note = 2'-O-methylcytidine-3'-phosphate
  modified_base 20: mod_base = OTHER; note = 2'-O-methyluridine-3'-phosphate
  modified_base 21: mod_base = OTHER; note = 2'-O-methyluridine-3'-phosphate N-[tris(GalNAc-alkyl)-amidodecanoyl)]-4-hydroxyprolinol (Hyp-(GalNAc-alkyl)3)
aagccaacaatccttggcctt

SEQ ID NO: 6876 - RNA, 21 nt, synthetic construct
  source 1..21: mol_type = other RNA
  modified_base 1: mod_base = OTHER; note = 2'-O-methyladenosine-3'-phosphorothioate
  modified_base 2: mod_base = OTHER; note = 2'-O-methylguanosine-3'-phosphorothioate
  modified_base 3: mod_base = OTHER; note = 2'-O-methylcytidine-3'-phosphate
  modified_base 4: mod_base = OTHER; note = 2'-O-methylcytidine-3'-phosphate
  modified_base 5: mod_base = OTHER; note = 2'-O-methyladenosine-3'-phosphate
  modified_base 6: mod_base = OTHER; note = 2'-O-methyladenosine-3'-phosphate
  modified_base 7: mod_base = OTHER; note = 2'-O-methylcytidine-3'-phosphate
  modified_base 8: mod_base = OTHER; note = 2'-O-methyladenosine-3'-phosphate
  modified_base 9: mod_base = OTHER; note = 2'-fluoroadenosine-3'-phosphate
  modified_base 10: mod_base = OTHER; note = 2'-fluorouridine-3'-phosphate
  modified_base 11: mod_base = OTHER; note = 2'-fluorocytidine-3'-phosphate
  modified_base 12: mod_base = OTHER; note = 2'-O-methylcytidine-3'-phosphate
  modified_base 13: mod_base = OTHER; note = 2'-O-methyluridine-3'-phosphate
  modified_base 14: mod_base = OTHER; note = 2'-O-methyluridine-3'-phosphate
  modified_base 15: mod_base = OTHER; note = 2'-O-methylguanosine-3'-phosphate
  modified_base 16: mod_base = OTHER; note = 2'-O-methylguanosine-3'-phosphate
  modified_base 17: mod_base = OTHER; note = 2'-O-methylcytidine-3'-phosphate
  modified_base 18: mod_base = OTHER; note = 2'-O-methylcytidine-3'-phosphate
  modified_base 19: mod_base = OTHER; note = 2'-O-methyluridine-3'-phosphate
  modified_base 20: mod_base = OTHER; note = 2'-O-methylguanosine-3'-phosphate
  modified_base 21: mod_base = OTHER; note = 2'-O-methyluridine-3'-phosphate N-[tris(GalNAc-alkyl)-amidodecanoyl)]-4-hydroxyprolinol (Hyp-(GalNAc-alkyl)3)
agccaacaatccttggcctgt

SEQ ID NO: 6877 - RNA, 21 nt, synthetic construct
  source 1..21: mol_type = other RNA
  modified_base 1: mod_base = OTHER; note = 2'-O-methylguanosine-3'-phosphorothioate
  modified_base 2: mod_base = OTHER; note = 2'-O-methylcytidine-3'-phosphorothioate
  modified_base 3: mod_base = OTHER; note = 2'-O-methylcytidine-3'-phosphate
  modified_base 4: mod_base = OTHER; note = 2'-O-methyladenosine-3'-phosphate
  modified_base 5: mod_base = OTHER; note = 2'-O-methyladenosine-3'-phosphate
  modified_base 6: mod_base = OTHER; note = 2'-O-methylcytidine-3'-phosphate
  modified_base 7: mod_base = OTHER; note = 2'-O-methyladenosine-3'-phosphate
  modified_base 8: mod_base = OTHER; note = 2'-O-methyladenosine-3'-phosphate
  modified_base 9: mod_base = OTHER; note = 2'-fluorouridine-3'-phosphate
  modified_base 10: mod_base = OTHER; note = 2'-fluorocytidine-3'-phosphate
  modified_base 11: mod_base = OTHER; note = 2'-fluorocytidine-3'-phosphate
  modified_base 12: mod_base = OTHER; note = 2'-O-methyluridine-3'-phosphate
  modified_base 13: mod_base = OTHER; note = 2'-O-methyluridine-3'-phosphate
  modified_base 14: mod_base = OTHER; note = 2'-O-methylguanosine-3'-phosphate
  modified_base 15: mod_base = OTHER; note = 2'-O-methylguanosine-3'-phosphate
  modified_base 16: mod_base = OTHER; note = 2'-O-methylcytidine-3'-phosphate
  modified_base 17: mod_base = OTHER; note = 2'-O-methylcytidine-3'-phosphate
  modified_base 18: mod_base = OTHER; note = 2'-O-methyluridine-3'-phosphate
  modified_base 19: mod_base = OTHER; note = 2'-O-methylguanosine-3'-phosphate
  modified_base 20: mod_base = OTHER; note = 2'-O-methylcytidine-3'-phosphate
  modified_base 21: mod_base = OTHER; note = 2'-O-methyluridine-3'-phosphate N-[tris(GalNAc-alkyl)-amidodecanoyl)]-4-hydroxyprolinol (Hyp-(GalNAc-alkyl)3)
gccaacaatccttggcctgct

SEQ ID NO: 6878 - RNA, 21 nt, synthetic construct
  source 1..21: mol_type = other RNA
  modified_base 1: mod_base = OTHER; note = 2'-O-methylcytidine-3'-phosphorothioate
  modified_base 2: mod_base = OTHER; note = 2'-O-methylcytidine-3'-phosphorothioate
  modified_base 3: mod_base = OTHER; note = 2'-O-methyladenosine-3'-phosphate
  modified_base 4: mod_base = OTHER; note = 2'-O-methyladenosine-3'-phosphate
  modified_base 5: mod_base = OTHER; note = 2'-O-methylcytidine-3'-phosphate
  modified_base 6: mod_base = OTHER; note = 2'-O-methyladenosine-3'-phosphate
  modified_base 7: mod_base = OTHER; note = 2'-O-methyladenosine-3'-phosphate
  modified_base 8: mod_base = OTHER; note = 2'-O-methyluridine-3'-phosphate
  modified_base 9: mod_base = OTHER; note = 2'-fluorocytidine-3'-phosphate
  modified_base 10: mod_base = OTHER; note = 2'-fluorocytidine-3'-phosphate
  modified_base 11: mod_base = OTHER; note = 2'-fluorouridine-3'-phosphate
  modified_base 12: mod_base = OTHER; note = 2'-O-methyluridine-3'-phosphate
  modified_base 13: mod_base = OTHER; note = 2'-O-methylguanosine-3'-phosphate
  modified_base 14: mod_base = OTHER; note = 2'-O-methylguanosine-3'-phosphate
  modified_base 15: mod_base = OTHER; note = 2'-O-methylcytidine-3'-phosphate
  modified_base 16: mod_base = OTHER; note = 2'-O-methylcytidine-3'-phosphate
  modified_base 17: mod_base = OTHER; note = 2'-O-methyluridine-3'-phosphate
  modified_base 18: mod_base = OTHER; note = 2'-O-methylguanosine-3'-phosphate
  modified_base 19: mod_base = OTHER; note = 2'-O-methylcytidine-3'-phosphate
  modified_base 20: mod_base = OTHER; note = 2'-O-methylcytidine-3'-phosphate
  modified_base 21: mod_base = OTHER; note = 2'-O-methyluridine-3'-phosphate N-[tris(GalNAc-alkyl)-amidodecanoyl)]-4-hydroxyprolinol (Hyp-(GalNAc-alkyl)3)
ccaacaatccttggcctgcct

SEQ ID NO: 6879 - RNA, 21 nt, synthetic construct
  source 1..21: mol_type = other RNA
  modified_base 1: mod_base = OTHER; note = 2'-O-methyladenosine-3'-phosphorothioate
  modified_base 2: mod_base = OTHER; note = 2'-O-methyladenosine-3'-phosphorothioate
  modified_base 3: mod_base = OTHER; note = 2'-O-methylcytidine-3'-phosphate
  modified_base 4: mod_base = OTHER; note = 2'-O-methyladenosine-3'-phosphate
  modified_base 5: mod_base = OTHER; note = 2'-O-methyladenosine-3'-phosphate
  modified_base 6: mod_base = OTHER; note = 2'-O-methyluridine-3'-phosphate
  modified_base 7: mod_base = OTHER; note = 2'-O-methylcytidine-3'-phosphate
  modified_base 8: mod_base = OTHER; note = 2'-O-methylcytidine-3'-phosphate
  modified_base 9: mod_base = OTHER; note = 2'-fluorouridine-3'-phosphate
  modified_base 10: mod_base = OTHER; note = 2'-fluorouridine-3'-phosphate
  modified_base 11: mod_base = OTHER; note = 2'-fluoroguanosine-3'-phosphate
  modified_base 12: mod_base = OTHER; note = 2'-O-methylguanosine-3'-phosphate
  modified_base 13: mod_base = OTHER; note = 2'-O-methylcytidine-3'-phosphate
  modified_base 14: mod_base = OTHER; note = 2'-O-methylcytidine-3'-phosphate
  modified_base 15: mod_base = OTHER; note = 2'-O-methyluridine-3'-phosphate
  modified_base 16: mod_base = OTHER; note = 2'-O-methylguanosine-3'-phosphate
  modified_base 17: mod_base = OTHER; note = 2'-O-methylcytidine-3'-phosphate
  modified_base 18: mod_base = OTHER; note = 2'-O-methylcytidine-3'-phosphate
  modified_base 19: mod_base = OTHER; note = 2'-O-methyladenosine-3'-phosphate
  modified_base 20: mod_base = OTHER; note = 2'-O-methylguanosine-3'-phosphate
  modified_base 21: mod_base = OTHER; note = 2'-O-methyluridine-3'-phosphate N-[tris(GalNAc-alkyl)-amidodecanoyl)]-4-hydroxyprolinol (Hyp-(GalNAc-alkyl)3)
aacaatccttggcctgccagt

SEQ ID NO: 6880 - RNA, 21 nt, synthetic construct
  source 1..21: mol_type = other RNA
  modified_base 1: mod_base = OTHER; note = 2'-O-methyladenosine-3'-phosphorothioate
  modified_base 2: mod_base = OTHER; note = 2'-O-methylcytidine-3'-phosphorothioate
  modified_base 3: mod_base = OTHER; note = 2'-O-methyladenosine-3'-phosphate
  modified_base 4: mod_base = OTHER; note = 2'-O-methyladenosine-3'-phosphate
  modified_base 5: mod_base = OTHER; note = 2'-O-methyluridine-3'-phosphate
  modified_base 6: mod_base = OTHER; note = 2'-O-methylcytidine-3'-phosphate
  modified_base 7: mod_base = OTHER; note = 2'-O-methylcytidine-3'-phosphate
  modified_base 8: mod_base = OTHER; note = 2'-O-methyluridine-3'-phosphate
  modified_base 9: mod_base = OTHER; note = 2'-fluorouridine-3'-phosphate
  modified_base 10: mod_base = OTHER; note = 2'-fluoroguanosine-3'-phosphate
  modified_base 11: mod_base = OTHER; note = 2'-fluoroguanosine-3'-phosphate
  modified_base 12: mod_base = OTHER; note = 2'-O-methylcytidine-3'-phosphate
  modified_base 13: mod_base = OTHER; note = 2'-O-methylcytidine-3'-phosphate
  modified_base 14: mod_base = OTHER; note = 2'-O-methyluridine-3'-phosphate
  modified_base 15: mod_base = OTHER; note = 2'-O-methylguanosine-3'-phosphate
  modified_base 16: mod_base = OTHER; note = 2'-O-methylcytidine-3'-phosphate
  modified_base 17: mod_base = OTHER; note = 2'-O-methylcytidine-3'-phosphate
  modified_base 18: mod_base = OTHER; note = 2'-O-methyladenosine-3'-phosphate
  modified_base 19: mod_base = OTHER; note = 2'-O-methylguanosine-3'-phosphate
  modified_base 20: mod_base = OTHER; note = 2'-O-methyluridine-3'-phosphate
  modified_base 21: mod_base = OTHER; note = 2'-O-methyluridine-3'-phosphate N-[tris(GalNAc-alkyl)-amidodecanoyl)]-4-hydroxyprolinol (Hyp-(GalNAc-alkyl)3)
acaatccttggcctgccagtt

SEQ ID NO: 6881 - RNA, 21 nt, synthetic construct
  source 1..21: mol_type = other RNA
  modified_base 1: mod_base = OTHER; note = 2'-O-methyluridine-3'-phosphorothioate
  modified_base 2: mod_base = OTHER; note = 2'-O-methyluridine-3'-phosphorothioate
  modified_base 3: mod_base = OTHER; note = 2'-O-methylguanosine-3'-phosphate
  modified_base 4: mod_base = OTHER; note = 2'-O-methylguanosine-3'-phosphate
  modified_base 5: mod_base = OTHER; note = 2'-O-methylcytidine-3'-phosphate
  modified_base 6: mod_base = OTHER; note = 2'-O-methylcytidine-3'-phosphate
  modified_base 7: mod_base = OTHER; note = 2'-O-methyluridine-3'-phosphate
  modified_base 8: mod_base = OTHER; note = 2'-O-methylguanosine-3'-phosphate
  modified_base 9: mod_base = OTHER; note = 2'-fluorocytidine-3'-phosphate
  modified_base 10: mod_base = OTHER; note = 2'-fluorocytidine-3'-phosphate
  modified_base 11: mod_base = OTHER; note = 2'-fluoroadenosine-3'-phosphate
  modified_base 12: mod_base = OTHER; note = 2'-O-methylguanosine-3'-phosphate
  modified_base 13: mod_base = OTHER; note = 2'-O-methyluridine-3'-phosphate
  modified_base 14: mod_base = OTHER; note = 2'-O-methyladenosine-3'-phosphate
  modified_base 15: mod_base = OTHER; note = 2'-O-methylcytidine-3'-phosphate
  modified_base 16: mod_base = OTHER; note = 2'-O-methylcytidine-3'-phosphate
  modified_base 17: mod_base = OTHER; note = 2'-O-methyluridine-3'-phosphate
  modified_base 18: mod_base = OTHER; note = 2'-O-methylcytidine-3'-phosphate
  modified_base 19: mod_base = OTHER; note = 2'-O-methylcytidine-3'-phosphate
  modified_base 20: mod_base = OTHER; note = 2'-O-methyluridine-3'-phosphate
  modified_base 21: mod_base = OTHER; note = 2'-O-methyluridine-3'-phosphate N-[tris(GalNAc-alkyl)-amidodecanoyl)]-4-hydroxyprolinol (Hyp-(GalNAc-alkyl)3)
ttggcctgccagtacctcctt

SEQ ID NO: 6882 - RNA, 21 nt, synthetic construct
  source 1..21: mol_type = other RNA
  modified_base 1: mod_base = OTHER; note = 2'-O-methylguanosine-3'-phosphorothioate
  modified_base 2: mod_base = OTHER; note = 2'-O-methyluridine-3'-phosphorothioate
  modified_base 3: mod_base = OTHER; note = 2'-O-methyluridine-3'-phosphate
  modified_base 4: mod_base = OTHER; note = 2'-O-methylguanosine-3'-phosphate
  modified_base 5: mod_base = OTHER; note = 2'-O-methyluridine-3'-phosphate
  modified_base 6: mod_base = OTHER; note = 2'-O-methylguanosine-3'-phosphate
  modified_base 7: mod_base = OTHER; note = 2'-O-methyluridine-3'-phosphate
  modified_base 8: mod_base = OTHER; note = 2'-O-methylcytidine-3'-phosphate
  modified_base 9: mod_base = OTHER; note = 2'-fluorocytidine-3'-phosphate
  modified_base 10: mod_base = OTHER; note = 2'-fluorocytidine-3'-phosphate
  modified_base 11: mod_base = OTHER; note = 2'-fluorouridine-3'-phosphate
  modified_base 12: mod_base = OTHER; note = 2'-O-methyladenosine-3'-phosphate
  modified_base 13: mod_base = OTHER; note = 2'-O-methylcytidine-3'-phosphate
  modified_base 14: mod_base = OTHER; note = 2'-O-methyluridine-3'-phosphate
  modified_base 15: mod_base = OTHER; note = 2'-O-methylguanosine-3'-phosphate
  modified_base 16: mod_base = OTHER; note = 2'-O-methylcytidine-3'-phosphate
  modified_base 17: mod_base = OTHER; note = 2'-O-methylcytidine-3'-phosphate
  modified_base 18: mod_base = OTHER; note = 2'-O-methylcytidine-3'-phosphate
  modified_base 19: mod_base = OTHER; note = 2'-O-methylguanosine-3'-phosphate
  modified_base 20: mod_base = OTHER; note = 2'-O-methyladenosine-3'-phosphate
  modified_base 21: mod_base = OTHER; note = 2'-O-methyluridine-3'-phosphate N-[tris(GalNAc-alkyl)-amidodecanoyl)]-4-hydroxyprolinol (Hyp-(GalNAc-alkyl)3)
gttgtgtccctactgcccgat

SEQ ID NO: 6883 - RNA, 21 nt, synthetic construct
  source 1..21: mol_type = other RNA
  modified_base 1: mod_base = OTHER; note = 2'-O-methyluridine-3'-phosphorothioate
  modified_base 2: mod_base = OTHER; note = 2'-O-methyluridine-3'-phosphorothioate
  modified_base 3: mod_base = OTHER; note = 2'-O-methylguanosine-3'-phosphate
  modified_base 4: mod_base = OTHER; note = 2'-O-methyluridine-3'-phosphate
  modified_base 5: mod_base = OTHER; note = 2'-O-methylguanosine-3'-phosphate
  modified_base 6: mod_base = OTHER; note = 2'-O-methyluridine-3'-phosphate
  modified_base 7: mod_base = OTHER; note = 2'-O-methylcytidine-3'-phosphate
  modified_base 8: mod_base = OTHER; note = 2'-O-methylcytidine-3'-phosphate
  modified_base 9: mod_base = OTHER; note = 2'-fluorocytidine-3'-phosphate
  modified_base 10: mod_base = OTHER; note = 2'-fluorouridine-3'-phosphate
  modified_base 11: mod_base = OTHER; note = 2'-fluoroadenosine-3'-phosphate
  modified_base 12: mod_base = OTHER; note = 2'-O-methylcytidine-3'-phosphate
  modified_base 13: mod_base = OTHER; note = 2'-O-methyluridine-3'-phosphate
  modified_base 14: mod_base = OTHER; note = 2'-O-methylguanosine-3'-phosphate
  modified_base 15: mod_base = OTHER; note = 2'-O-methylcytidine-3'-phosphate
  modified_base 16: mod_base = OTHER; note = 2'-O-methylcytidine-3'-phosphate
  modified_base 17: mod_base = OTHER; note = 2'-O-methylcytidine-3'-phosphate
  modified_base 18: mod_base = OTHER; note = 2'-O-methylguanosine-3'-phosphate
  modified_base 19: mod_base = OTHER; note = 2'-O-methyladenosine-3'-phosphate
  modified_base 20: mod_base = OTHER; note = 2'-O-methyladenosine-3'-phosphate
  modified_base 21: mod_base = OTHER; note = 2'-O-methyluridine-3'-phosphate N-[tris(GalNAc-alkyl)-amidodecanoyl)]-4-hydroxyprolinol (Hyp-(GalNAc-alkyl)3)
ttgtgtccctactgcccgaat

SEQ ID NO: 6884 - RNA, 21 nt, synthetic construct
  source 1..21: mol_type = other RNA
  modified_base 1: mod_base = OTHER; note = 2'-O-methyluridine-3'-phosphorothioate
  modified_base 2: mod_base = OTHER; note = 2'-O-methylguanosine-3'-phosphorothioate
  modified_base 3: mod_base = OTHER; note = 2'-O-methyluridine-3'-phosphate
  modified_base 4: mod_base = OTHER; note = 2'-O-methylguanosine-3'-phosphate
  modified_base 5: mod_base = OTHER; note = 2'-O-methyluridine-3'-phosphate
  modified_base 6: mod_base = OTHER; note = 2'-O-methylcytidine-3'-phosphate
  modified_base 7: mod_base = OTHER; note = 2'-O-methylcytidine-3'-phosphate
  modified_base 8: mod_base = OTHER; note = 2'-O-methylcytidine-3'-phosphate
  modified_base 9: mod_base = OTHER; note = 2'-fluorouridine-3'-phosphate
  modified_base 10: mod_base = OTHER; note = 2'-fluoroadenosine-3'-phosphate
  modified_base 11: mod_base = OTHER; note = 2'-fluorocytidine-3'-phosphate
  modified_base 12: mod_base = OTHER; note = 2'-O-methyluridine-3'-phosphate
  modified_base 13: mod_base = OTHER; note = 2'-O-methylguanosine-3'-phosphate
  modified_base 14: mod_base = OTHER; note = 2'-O-methylcytidine-3'-phosphate
  modified_base 15: mod_base = OTHER; note = 2'-O-methylcytidine-3'-phosphate
  modified_base 16: mod_base = OTHER; note = 2'-O-methylcytidine-3'-phosphate
  modified_base 17: mod_base = OTHER; note = 2'-O-methylguanosine-3'-phosphate
  modified_base 18: mod_base = OTHER; note = 2'-O-methyladenosine-3'-phosphate
  modified_base 19: mod_base = OTHER; note = 2'-O-methyladenosine-3'-phosphate
  modified_base 20: mod_base = OTHER; note = 2'-O-methylguanosine-3'-phosphate
  modified_base 21: mod_base = OTHER; note = 2'-O-methyluridine-3'-phosphate N-[tris(GalNAc-alkyl)-amidodecanoyl)]-4-hydroxyprolinol (Hyp-(GalNAc-alkyl)3)
tgtgtccctactgcccgaagt

SEQ ID NO: 6885 - RNA, 21 nt, synthetic construct
  source 1..21: mol_type = other RNA
  modified_base 1: mod_base = OTHER; note = 2'-O-methylguanosine-3'-phosphorothioate
  modified_base 2: mod_base = OTHER; note = 2'-O-methyluridine-3'-phosphorothioate
  modified_base 3: mod_base = OTHER; note = 2'-O-methylguanosine-3'-phosphate
  modified_base 4: mod_base = OTHER; note = 2'-O-methyluridine-3'-phosphate
  modified_base 5: mod_base = OTHER; note = 2'-O-methylcytidine-3'-phosphate
  modified_base 6: mod_base = OTHER; note = 2'-O-methylcytidine-3'-phosphate
  modified_base 7: mod_base = OTHER; note = 2'-O-methylcytidine-3'-phosphate
  modified_base 8: mod_base = OTHER; note = 2'-O-methyluridine-3'-phosphate
  modified_base 9: mod_base = OTHER; note = 2'-fluoroadenosine-3'-phosphate
  modified_base 10: mod_base = OTHER; note = 2'-fluorocytidine-3'-phosphate
  modified_base 11: mod_base = OTHER; note = 2'-fluorouridine-3'-phosphate
  modified_base 12: mod_base = OTHER; note = 2'-O-methylguanosine-3'-phosphate
  modified_base 13: mod_base = OTHER; note = 2'-O-methylcytidine-3'-phosphate
  modified_base 14: mod_base = OTHER; note = 2'-O-methylcytidine-3'-phosphate
  modified_base 15: mod_base = OTHER; note = 2'-O-methylcytidine-3'-phosphate
  modified_base 16: mod_base = OTHER; note = 2'-O-methylguanosine-3'-phosphate
  modified_base 17: mod_base = OTHER; note = 2'-O-methyladenosine-3'-phosphate
  modified_base 18: mod_base = OTHER; note = 2'-O-methyladenosine-3'-phosphate
  modified_base 19: mod_base = OTHER; note = 2'-O-methylguanosine-3'-phosphate
  modified_base 20: mod_base = OTHER; note = 2'-O-methylguanosine-3'-phosphate
  modified_base 21: mod_base = OTHER; note = 2'-O-methyluridine-3'-phosphate N-[tris(GalNAc-alkyl)-amidodecanoyl)]-4-hydroxyprolinol (Hyp-(GalNAc-alkyl)3)
gtgtccctactgcccgaaggt

SEQ ID NO: 6886 - RNA, 21 nt, synthetic construct
  source 1..21: mol_type = other RNA
  modified_base 1: mod_base = OTHER; note = 2'-O-methyluridine-3'-phosphorothioate
  modified_base 2: mod_base = OTHER; note = 2'-O-methylguanosine-3'-phosphorothioate
  modified_base 3: mod_base = OTHER; note = 2'-O-methyluridine-3'-phosphate
  modified_base 4: mod_base = OTHER; note = 2'-O-methylcytidine-3'-phosphate
  modified_base 5: mod_base = OTHER; note = 2'-O-methylcytidine-3'-phosphate
  modified_base 6: mod_base = OTHER; note = 2'-O-methylcytidine-3'-phosphate
  modified_base 7: mod_base = OTHER; note = 2'-O-methyluridine-3'-phosphate
  modified_base 8: mod_base = OTHER; note = 2'-O-methyladenosine-3'-phosphate
  modified_base 9: mod_base = OTHER; note = 2'-fluorocytidine-3'-phosphate
  modified_base 10: mod_base = OTHER; note = 2'-fluorouridine-3'-phosphate
  modified_base 11: mod_base = OTHER; note = 2'-fluoroguanosine-3'-phosphate
  modified_base 12: mod_base = OTHER; note = 2'-O-methylcytidine-3'-phosphate
  modified_base 13: mod_base = OTHER; note = 2'-O-methylcytidine-3'-phosphate
  modified_base 14: mod_base = OTHER; note = 2'-O-methylcytidine-3'-phosphate
  modified_base 15: mod_base = OTHER; note = 2'-O-methylguanosine-3'-phosphate
  modified_base 16: mod_base = OTHER; note = 2'-O-methyladenosine-3'-phosphate
  modified_base 17: mod_base = OTHER; note = 2'-O-methyladenosine-3'-phosphate
  modified_base 18: mod_base = OTHER; note = 2'-O-methylguanosine-3'-phosphate
  modified_base 19: mod_base = OTHER; note = 2'-O-methylguanosine-3'-phosphate
  modified_base 20: mod_base = OTHER; note = 2'-O-methylcytidine-3'-phosphate
  modified_base 21: mod_base = OTHER; note = 2'-O-methyluridine-3'-phosphate N-[tris(GalNAc-alkyl)-amidodecanoyl)]-4-hydroxyprolinol (Hyp-(GalNAc-alkyl)3)
tgtccctactgcccgaaggct

SEQ ID NO: 6887 - RNA, 21 nt, synthetic construct
  source 1..21: mol_type = other RNA
  modified_base 1: mod_base = OTHER; note = 2'-O-methyluridine-3'-phosphorothioate
  modified_base 2: mod_base = OTHER; note = 2'-O-methylcytidine-3'-phosphorothioate
  modified_base 3: mod_base = OTHER; note = 2'-O-methyluridine-3'-phosphate
  modified_base 4: mod_base = OTHER; note = 2'-O-methylcytidine-3'-phosphate
  modified_base 5: mod_base = OTHER; note = 2'-O-methyluridine-3'-phosphate
  modified_base 6: mod_base = OTHER; note = 2'-O-methylcytidine-3'-phosphate
  modified_base 7: mod_base = OTHER; note = 2'-O-methyluridine-3'-phosphate
  modified_base 8: mod_base = OTHER; note = 2'-O-methylcytidine-3'-phosphate
  modified_base 9: mod_base = OTHER; note = 2'-fluorocytidine-3'-phosphate
  modified_base 10: mod_base = OTHER; note = 2'-fluorouridine-3'-phosphate
  modified_base 11: mod_base = OTHER; note = 2'-fluorocytidine-3'-phosphate
  modified_base 12: mod_base = OTHER; note = 2'-O-methyluridine-3'-phosphate
  modified_base 13: mod_base = OTHER; note = 2'-O-methyladenosine-3'-phosphate
  modified_base 14: mod_base = OTHER; note = 2'-O-methylcytidine-3'-phosphate
  modified_base 15: mod_base = OTHER; note = 2'-O-methylcytidine-3'-phosphate
  modified_base 16: mod_base = OTHER; note = 2'-O-methyluridine-3'-phosphate
  modified_base 17: mod_base = OTHER; note = 2'-O-methylguanosine-3'-phosphate
  modified_base 18: mod_base = OTHER; note = 2'-O-methylguanosine-3'-phosphate
  modified_base 19: mod_base = OTHER; note = 2'-O-methyladenosine-3'-phosphate
  modified_base 20: mod_base = OTHER; note = 2'-O-methyluridine-3'-phosphate
  modified_base 21: mod_base = OTHER; note = 2'-O-methyluridine-3'-phosphate N-[tris(GalNAc-alkyl)-amidodecanoyl)]-4-hydroxyprolinol (Hyp-(GalNAc-alkyl)3)
tctctctcctctacctggatt

SEQ ID NO: 6888 - RNA, 21 nt, synthetic construct
  source 1..21: mol_type = other RNA
  modified_base 1: mod_base = OTHER; note = 2'-O-methylcytidine-3'-phosphorothioate
  modified_base 2: mod_base = OTHER; note = 2'-O-methyluridine-3'-phosphorothioate
  modified_base 3: mod_base = OTHER; note = 2'-O-methylcytidine-3'-phosphate
  modified_base 4: mod_base = OTHER; note = 2'-O-methyluridine-3'-phosphate
  modified_base 5: mod_base = OTHER; note = 2'-O-methylcytidine-3'-phosphate
  modified_base 6: mod_base = OTHER; note = 2'-O-methyluridine-3'-phosphate
  modified_base 7: mod_base = OTHER; note = 2'-O-methylcytidine-3'-phosphate
  modified_base 8: mod_base = OTHER; note = 2'-O-methylcytidine-3'-phosphate
  modified_base 9: mod_base = OTHER; note = 2'-fluorouridine-3'-phosphate
  modified_base 10: mod_base = OTHER; note = 2'-fluorocytidine-3'-phosphate
  modified_base 11: mod_base = OTHER; note = 2'-fluorouridine-3'-phosphate
  modified_base 12: mod_base = OTHER; note = 2'-O-methyladenosine-3'-phosphate
  modified_base 13: mod_base = OTHER; note = 2'-O-methylcytidine-3'-phosphate
  modified_base 14: mod_base = OTHER; note = 2'-O-methylcytidine-3'-phosphate
  modified_base 15: mod_base = OTHER; note = 2'-O-methyluridine-3'-phosphate
  modified_base 16: mod_base = OTHER; note = 2'-O-methylguanosine-3'-phosphate
  modified_base 17: mod_base = OTHER; note = 2'-O-methylguanosine-3'-phosphate
  modified_base 18: mod_base = OTHER; note = 2'-O-methyladenosine-3'-phosphate
  modified_base 19: mod_base = OTHER; note = 2'-O-methyluridine-3'-phosphate
  modified_base 20: mod_base = OTHER; note = 2'-O-methylcytidine-3'-phosphate
  modified_base 21: mod_base = OTHER; note = 2'-O-methyluridine-3'-phosphate N-[tris(GalNAc-alkyl)-amidodecanoyl)]-4-hydroxyprolinol (Hyp-(GalNAc-alkyl)3)
ctctctcctctacctggatct

SEQ ID NO: 6889 - RNA, 21 nt, synthetic construct
  source 1..21: mol_type = other RNA
  modified_base 1: mod_base = OTHER; note = 2'-O-methyluridine-3'-phosphorothioate
  modified_base 2: mod_base = OTHER; note = 2'-O-methylcytidine-3'-phosphorothioate
  modified_base 3: mod_base = OTHER; note = 2'-O-methyluridine-3'-phosphate
  modified_base 4: mod_base = OTHER; note = 2'-O-methylcytidine-3'-phosphate
  modified_base 5: mod_base = OTHER; note = 2'-O-methyluridine-3'-phosphate
  modified_base 6: mod_base = OTHER; note = 2'-O-methylcytidine-3'-phosphate
  modified_base 7: mod_base = OTHER; note = 2'-O-methylcytidine-3'-phosphate
  modified_base 8: mod_base = OTHER; note = 2'-O-methyluridine-3'-phosphate
  modified_base 9: mod_base = OTHER; note = 2'-fluorocytidine-3'-phosphate
  modified_base 10: mod_base = OTHER; note = 2'-fluorouridine-3'-phosphate
  modified_base 11: mod_base = OTHER; note = 2'-fluoroadenosine-3'-phosphate
  modified_base 12: mod_base = OTHER; note = 2'-O-methylcytidine-3'-phosphate
  modified_base 13: mod_base = OTHER; note = 2'-O-methylcytidine-3'-phosphate
  modified_base 14: mod_base = OTHER; note = 2'-O-methyluridine-3'-phosphate
  modified_base 15: mod_base = OTHER; note = 2'-O-methylguanosine-3'-phosphate
  modified_base 16: mod_base = OTHER; note = 2'-O-methylguanosine-3'-phosphate
  modified_base 17: mod_base = OTHER; note = 2'-O-methyladenosine-3'-phosphate
  modified_base 18: mod_base = OTHER; note = 2'-O-methyluridine-3'-phosphate
  modified_base 19: mod_base = OTHER; note = 2'-O-methylcytidine-3'-phosphate
  modified_base 20: mod_base = OTHER; note = 2'-O-methyladenosine-3'-phosphate
  modified_base 21: mod_base = OTHER; note = 2'-O-methyluridine-3'-phosphate N-[tris(GalNAc-alkyl)-amidodecanoyl)]-4-hydroxyprolinol (Hyp-(GalNAc-alkyl)3)
tctctcctctacctggatcat

SEQ ID NO: 6890 - RNA, 21 nt, synthetic construct
  source 1..21: mol_type = other RNA
  modified_base 1: mod_base = OTHER; note = 2'-O-methylcytidine-3'-phosphorothioate
  modified_base 2: mod_base = OTHER; note = 2'-O-methyluridine-3'-phosphorothioate
  modified_base 3: mod_base = OTHER; note = 2'-O-methylcytidine-3'-phosphate
  modified_base 4: mod_base = OTHER; note = 2'-O-methyluridine-3'-phosphate
  modified_base 5: mod_base = OTHER; note = 2'-O-methylcytidine-3'-phosphate
  modified_base 6: mod_base = OTHER; note = 2'-O-methylcytidine-3'-phosphate
  modified_base 7: mod_base = OTHER; note = 2'-O-methyluridine-3'-phosphate
  modified_base 8: mod_base = OTHER; note = 2'-O-methylcytidine-3'-phosphate
  modified_base 9: mod_base = OTHER; note = 2'-fluorouridine-3'-phosphate
  modified_base 10: mod_base = OTHER; note = 2'-fluoroadenosine-3'-phosphate
  modified_base 11: mod_base = OTHER; note = 2'-fluorocytidine-3'-phosphate
  modified_base 12: mod_base = OTHER; note = 2'-O-methylcytidine-3'-phosphate
  modified_base 13: mod_base = OTHER; note = 2'-O-methyluridine-3'-phosphate
  modified_base 14: mod_base = OTHER; note = 2'-O-methylguanosine-3'-phosphate
  modified_base 15: mod_base = OTHER; note = 2'-O-methylguanosine-3'-phosphate
  modified_base 16: mod_base = OTHER; note = 2'-O-methyladenosine-3'-phosphate
  modified_base 17: mod_base = OTHER; note = 2'-O-methyluridine-3'-phosphate
  modified_base 18: mod_base = OTHER; note = 2'-O-methylcytidine-3'-phosphate
  modified_base 19: mod_base = OTHER; note = 2'-O-methyladenosine-3'-phosphate
  modified_base 20: mod_base = OTHER; note = 2'-O-methyluridine-3'-phosphate
  modified_base 21: mod_base = OTHER; note = 2'-O-methyluridine-3'-phosphate N-[tris(GalNAc-alkyl)-amidodecanoyl)]-4-hydroxyprolinol (Hyp-(GalNAc-alkyl)3)
ctctcctctacctggatcatt

SEQ ID NO: 6891 - RNA, 21 nt, synthetic construct
  source 1..21: mol_type = other RNA
  modified_base 1: mod_base = OTHER; note = 2'-O-methyluridine-3'-phosphorothioate
  modified_base 2: mod_base = OTHER; note = 2'-O-methylcytidine-3'-phosphorothioate
  modified_base 3: mod_base = OTHER; note = 2'-O-methyluridine-3'-phosphate
  modified_base 4: mod_base = OTHER; note = 2'-O-methylcytidine-3'-phosphate
  modified_base 5: mod_base = OTHER; note = 2'-O-methylcytidine-3'-phosphate
  modified_base 6: mod_base = OTHER; note = 2'-O-methyluridine-3'-phosphate
  modified_base 7: mod_base = OTHER; note = 2'-O-methylcytidine-3'-phosphate
  modified_base 8: mod_base = OTHER; note = 2'-O-methyluridine-3'-phosphate
  modified_base 9: mod_base = OTHER; note = 2'-fluoroadenosine-3'-phosphate
  modified_base 10: mod_base = OTHER; note = 2'-fluorocytidine-3'-phosphate
  modified_base 11: mod_base = OTHER; note = 2'-fluorocytidine-3'-phosphate
  modified_base 12: mod_base = OTHER; note = 2'-O-methyluridine-3'-phosphate
  modified_base 13: mod_base = OTHER; note = 2'-O-methylguanosine-3'-phosphate
  modified_base 14: mod_base = OTHER; note = 2'-O-methylguanosine-3'-phosphate
  modified_base 15: mod_base = OTHER; note = 2'-O-methyladenosine-3'-phosphate
  modified_base 16: mod_base = OTHER; note = 2'-O-methyluridine-3'-phosphate
  modified_base 17: mod_base = OTHER; note = 2'-O-methylcytidine-3'-phosphate
  modified_base 18: mod_base = OTHER; note = 2'-O-methyladenosine-3'-phosphate
  modified_base 19: mod_base = OTHER; note = 2'-O-methyluridine-3'-phosphate
  modified_base 20: mod_base = OTHER; note = 2'-O-methyladenosine-3'-phosphate
  modified_base 21: mod_base = OTHER; note = 2'-O-methyluridine-3'-phosphate N-[tris(GalNAc-alkyl)-amidodecanoyl)]-4-hydroxyprolinol (Hyp-(GalNAc-alkyl)3)
tctcctctacctggatcatat

SEQ ID NO: 6892 - RNA, 21 nt, synthetic construct
  source 1..21: mol_type = other RNA
  modified_base 1: mod_base = OTHER; note = 2'-O-methylcytidine-3'-phosphorothioate
  modified_base 2: mod_base = OTHER; note = 2'-O-methyluridine-3'-phosphorothioate
  modified_base 3: mod_base = OTHER; note = 2'-O-methylcytidine-3'-phosphate
  modified_base 4: mod_base = OTHER; note = 2'-O-methylcytidine-3'-phosphate
  modified_base 5: mod_base = OTHER; note = 2'-O-methyluridine-3'-phosphate
  modified_base 6: mod_base = OTHER; note = 2'-O-methylcytidine-3'-phosphate
  modified_base 7: mod_base = OTHER; note = 2'-O-methyluridine-3'-phosphate
  modified_base 8: mod_base = OTHER; note = 2'-O-methyladenosine-3'-phosphate
  modified_base 9: mod_base = OTHER; note = 2'-fluorocytidine-3'-phosphate
  modified_base 10: mod_base = OTHER; note = 2'-fluorocytidine-3'-phosphate
  modified_base 11: mod_base = OTHER; note = 2'-fluorouridine-3'-phosphate
  modified_base 12: mod_base = OTHER; note = 2'-O-methylguanosine-3'-phosphate
  modified_base 13: mod_base = OTHER; note = 2'-O-methylguanosine-3'-phosphate
  modified_base 14: mod_base = OTHER; note = 2'-O-methyladenosine-3'-phosphate
  modified_base 15: mod_base = OTHER; note = 2'-O-methyluridine-3'-phosphate
  modified_base 16: mod_base = OTHER; note = 2'-O-methylcytidine-3'-phosphate
  modified_base 17: mod_base = OTHER; note = 2'-O-methyladenosine-3'-phosphate
  modified_base 18: mod_base = OTHER; note = 2'-O-methyluridine-3'-phosphate
  modified_base 19: mod_base = OTHER; note = 2'-O-methyladenosine-3'-phosphate
  modified_base 20: mod_base = OTHER; note = 2'-O-methyladenosine-3'-phosphate
  modified_base 21: mod_base = OTHER; note = 2'-O-methyluridine-3'-phosphate N-[tris(GalNAc-alkyl)-amidodecanoyl)]-4-hydroxyprolinol (Hyp-(GalNAc-alkyl)3)
ctcctctacctggatcataat

SEQ ID NO: 6893 - RNA, 21 nt, synthetic construct
  source 1..21: mol_type = other RNA
  modified_base 1: mod_base = OTHER; note = 2'-O-methyluridine-3'-phosphorothioate
  modified_base 2: mod_base = OTHER; note = 2'-O-methylcytidine-3'-phosphorothioate
  modified_base 3: mod_base = OTHER; note = 2'-O-methylcytidine-3'-phosphate
  modified_base 4: mod_base = OTHER; note = 2'-O-methyluridine-3'-phosphate
  modified_base 5: mod_base = OTHER; note = 2'-O-methylcytidine-3'-phosphate
  modified_base 6: mod_base = OTHER; note = 2'-O-methyluridine-3'-phosphate
  modified_base 7: mod_base = OTHER; note = 2'-O-methyladenosine-3'-phosphate
  modified_base 8: mod_base = OTHER; note = 2'-O-methylcytidine-3'-phosphate
  modified_base 9: mod_base = OTHER; note = 2'-fluorocytidine-3'-phosphate
  modified_base 10: mod_base = OTHER; note = 2'-fluorouridine-3'-phosphate
  modified_base 11: mod_base = OTHER; note = 2'-fluoroguanosine-3'-phosphate
  modified_base 12: mod_base = OTHER; note = 2'-O-methylguanosine-3'-phosphate
  modified_base 13: mod_base = OTHER; note = 2'-O-methyladenosine-3'-phosphate
  modified_base 14: mod_base = OTHER; note = 2'-O-methyluridine-3'-phosphate
  modified_base 15: mod_base = OTHER; note = 2'-O-methylcytidine-3'-phosphate
  modified_base 16: mod_base = OTHER; note = 2'-O-methyladenosine-3'-phosphate
  modified_base 17: mod_base = OTHER; note = 2'-O-methyluridine-3'-phosphate
  modified_base 18: mod_base = OTHER; note = 2'-O-methyladenosine-3'-phosphate
  modified_base 19: mod_base = OTHER; note = 2'-O-methyladenosine-3'-phosphate
  modified_base 20: mod_base = OTHER; note = 2'-O-methyluridine-3'-phosphate
  modified_base 21: mod_base = OTHER; note = 2'-O-methyluridine-3'-phosphate N-[tris(GalNAc-alkyl)-amidodecanoyl)]-4-hydroxyprolinol (Hyp-(GalNAc-alkyl)3)
tcctctacctggatcataatt

SEQ ID NO: 6894 - RNA, 21 nt, synthetic construct
  source 1..21: mol_type = other RNA
  modified_base 1: mod_base = OTHER; note = 2'-O-methylcytidine-3'-phosphorothioate
  modified_base 2: mod_base = OTHER; note = 2'-O-methylcytidine-3'-phosphorothioate
  modified_base 3: mod_base = OTHER; note = 2'-O-methyluridine-3'-phosphate
  modified_base 4: mod_base = OTHER; note = 2'-O-methylcytidine-3'-phosphate
  modified_base 5: mod_base = OTHER; note = 2'-O-methyluridine-3'-phosphate
  modified_base 6: mod_base = OTHER; note = 2'-O-methyladenosine-3'-phosphate
  modified_base 7: mod_base = OTHER; note = 2'-O-methylcytidine-3'-phosphate
  modified_base 8: mod_base = OTHER; note = 2'-O-methylcytidine-3'-phosphate
  modified_base 9: mod_base = OTHER; note = 2'-fluorouridine-3'-phosphate
  modified_base 10: mod_base = OTHER; note = 2'-fluoroguanosine-3'-phosphate
  modified_base 11: mod_base = OTHER; note = 2'-fluoroguanosine-3'-phosphate
  modified_base 12: mod_base = OTHER; note = 2'-O-methyladenosine-3'-phosphate
  modified_base 13: mod_base = OTHER; note = 2'-O-methyluridine-3'-phosphate
  modified_base 14: mod_base = OTHER; note = 2'-O-methylcytidine-3'-phosphate
  modified_base 15: mod_base = OTHER; note = 2'-O-methyladenosine-3'-phosphate
  modified_base 16: mod_base = OTHER; note = 2'-O-methyluridine-3'-phosphate
  modified_base 17: mod_base = OTHER; note = 2'-O-methyladenosine-3'-phosphate
  modified_base 18: mod_base = OTHER; note = 2'-O-methyladenosine-3'-phosphate
  modified_base 19: mod_base = OTHER; note = 2'-O-methyluridine-3'-phosphate
  modified_base 20: mod_base = OTHER; note = 2'-O-methylguanosine-3'-phosphate
  modified_base 21: mod_base = OTHER; note = 2'-O-methyluridine-3'-phosphate N-[tris(GalNAc-alkyl)-amidodecanoyl)]-4-hydroxyprolinol (Hyp-(GalNAc-alkyl)3)
cctctacctggatcataatgt

SEQ ID NO: 6895 - RNA, 21 nt, synthetic construct
  source 1..21: mol_type = other RNA
  modified_base 1: mod_base = OTHER; note = 2'-O-methylcytidine-3'-phosphorothioate
  modified_base 2: mod_base = OTHER; note = 2'-O-methyluridine-3'-phosphorothioate
  modified_base 3: mod_base = OTHER; note = 2'-O-methylcytidine-3'-phosphate
  modified_base 4: mod_base = OTHER; note = 2'-O-methyluridine-3'-phosphate
  modified_base 5: mod_base = OTHER; note = 2'-O-methyladenosine-3'-phosphate
  modified_base 6: mod_base = OTHER; note = 2'-O-methylcytidine-3'-phosphate
  modified_base 7: mod_base = OTHER; note = 2'-O-methylcytidine-3'-phosphate
  modified_base 8: mod_base = OTHER; note = 2'-O-methyluridine-3'-phosphate
  modified_base 9: mod_base = OTHER; note = 2'-fluoroguanosine-3'-phosphate
  modified_base 10: mod_base = OTHER; note = 2'-fluoroguanosine-3'-phosphate
  modified_base 11: mod_base = OTHER; note = 2'-fluoroadenosine-3'-phosphate
  modified_base 12: mod_base = OTHER; note = 2'-O-methyluridine-3'-phosphate
  modified_base 13: mod_base = OTHER; note = 2'-O-methylcytidine-3'-phosphate
  modified_base 14: mod_base = OTHER; note = 2'-O-methyladenosine-3'-phosphate
  modified_base 15: mod_base = OTHER; note = 2'-O-methyluridine-3'-phosphate
  modified_base 16: mod_base = OTHER; note = 2'-O-methyladenosine-3'-phosphate
  modified_base 17: mod_base = OTHER; note = 2'-O-methyladenosine-3'-phosphate
  modified_base 18: mod_base = OTHER; note = 2'-O-methyluridine-3'-phosphate
  modified_base 19: mod_base = OTHER; note = 2'-O-methylguanosine-3'-phosphate
  modified_base 20: mod_base = OTHER; note = 2'-O-methylguanosine-3'-phosphate
  modified_base 21: mod_base = OTHER; note = 2'-O-methyluridine-3'-phosphate N-[tris(GalNAc-alkyl)-amidodecanoyl)]-4-hydroxyprolinol (Hyp-(GalNAc-alkyl)3)
ctctacctggatcataatggt

SEQ ID NO: 6896 - RNA, 21 nt, synthetic construct
  source 1..21: mol_type = other RNA
  modified_base 1: mod_base = OTHER; note = 2'-O-methyluridine-3'-phosphorothioate
  modified_base 2: mod_base = OTHER; note = 2'-O-methylcytidine-3'-phosphorothioate
  modified_base 3: mod_base = OTHER; note = 2'-O-methyluridine-3'-phosphate
  modified_base 4: mod_base = OTHER; note = 2'-O-methyladenosine-3'-phosphate
  modified_base 5: mod_base = OTHER; note = 2'-O-methylcytidine-3'-phosphate
  modified_base 6: mod_base = OTHER; note = 2'-O-methylcytidine-3'-phosphate
  modified_base 7: mod_base = OTHER; note = 2'-O-methyluridine-3'-phosphate
  modified_base 8: mod_base = OTHER; note = 2'-O-methylguanosine-3'-phosphate
  modified_base 9: mod_base = OTHER; note = 2'-fluoroguanosine-3'-phosphate
  modified_base 10: mod_base = OTHER; note = 2'-fluoroadenosine-3'-phosphate
  modified_base 11: mod_base = OTHER; note = 2'-fluorouridine-3'-phosphate
  modified_base 12: mod_base = OTHER; note = 2'-O-methylcytidine-3'-phosphate
  modified_base 13: mod_base = OTHER; note = 2'-O-methyladenosine-3'-phosphate
  modified_base 14: mod_base = OTHER; note = 2'-O-methyluridine-3'-phosphate
  modified_base 15: mod_base = OTHER; note = 2'-O-methyladenosine-3'-phosphate
  modified_base 16: mod_base = OTHER; note = 2'-O-methyladenosine-3'-phosphate
  modified_base 17: mod_base = OTHER; note = 2'-O-methyluridine-3'-phosphate
  modified_base 18: mod_base = OTHER; note = 2'-O-methylguanosine-3'-phosphate
  modified_base 19: mod_base = OTHER; note = 2'-O-methylguanosine-3'-phosphate
  modified_base 20: mod_base = OTHER; note = 2'-O-methylcytidine-3'-phosphate
  modified_base 21: mod_base = OTHER; note = 2'-O-methyluridine-3'-phosphate N-[tris(GalNAc-alkyl)-amidodecanoyl)]-4-hydroxyprolinol (Hyp-(GalNAc-alkyl)3)
tctacctggatcataatggct

SEQ ID NO: 6897 - RNA, 21 nt, synthetic construct
  source 1..21: mol_type = other RNA
  modified_base 1: mod_base = OTHER; note = 2'-O-methylcytidine-3'-phosphorothioate
  modified_base 2: mod_base = OTHER; note = 2'-O-methyluridine-3'-phosphorothioate
  modified_base 3: mod_base = OTHER; note = 2'-O-methyladenosine-3'-phosphate
  modified_base 4: mod_base = OTHER; note = 2'-O-methylcytidine-3'-phosphate
  modified_base 5: mod_base = OTHER; note = 2'-O-methylcytidine-3'-phosphate
  modified_base 6: mod_base = OTHER; note = 2'-O-methyluridine-3'-phosphate
  modified_base 7: mod_base = OTHER; note = 2'-O-methylguanosine-3'-phosphate
  modified_base 8: mod_base = OTHER; note = 2'-O-methylguanosine-3'-phosphate
  modified_base 9: mod_base = OTHER; note = 2'-fluoroadenosine-3'-phosphate
  modified_base 10: mod_base = OTHER; note = 2'-fluorouridine-3'-phosphate
  modified_base 11: mod_base = OTHER; note = 2'-fluorocytidine-3'-phosphate
  modified_base 12: mod_base = OTHER; note = 2'-O-methyladenosine-3'-phosphate
  modified_base 13: mod_base = OTHER; note = 2'-O-methyluridine-3'-phosphate
  modified_base 14: mod_base = OTHER; note = 2'-O-methyladenosine-3'-phosphate
  modified_base 15: mod_base = OTHER; note = 2'-O-methyladenosine-3'-phosphate
  modified_base 16: mod_base = OTHER; note = 2'-O-methyluridine-3'-phosphate
  modified_base 17: mod_base = OTHER; note = 2'-O-methylguanosine-3'-phosphate
  modified_base 18: mod_base = OTHER; note = 2'-O-methylguanosine-3'-phosphate
  modified_base 19: mod_base = OTHER; note = 2'-O-methylcytidine-3'-phosphate
  modified_base 20: mod_base = OTHER; note = 2'-O-methyladenosine-3'-phosphate
  modified_base 21: mod_base = OTHER; note = 2'-O-methyluridine-3'-phosphate N-[tris(GalNAc-alkyl)-amidodecanoyl)]-4-hydroxyprolinol (Hyp-(GalNAc-alkyl)3)
ctacctggatcataatggcat

SEQ ID NO: 6898 - RNA, 21 nt, synthetic construct
  source 1..21: mol_type = other RNA
  modified_base 1: mod_base = OTHER; note = 2'-O-methyluridine-3'-phosphorothioate
  modified_base 2: mod_base = OTHER; note = 2'-O-methyladenosine-3'-phosphorothioate
  modified_base 3: mod_base = OTHER; note = 2'-O-methylcytidine-3'-phosphate
  modified_base 4: mod_base = OTHER; note = 2'-O-methylcytidine-3'-phosphate
  modified_base 5: mod_base = OTHER; note = 2'-O-methyluridine-3'-phosphate
  modified_base 6: mod_base = OTHER; note = 2'-O-methylguanosine-3'-phosphate
  modified_base 7: mod_base = OTHER; note = 2'-O-methylguanosine-3'-phosphate
  modified_base 8: mod_base = OTHER; note = 2'-O-methyladenosine-3'-phosphate
  modified_base 9: mod_base = OTHER; note = 2'-fluorouridine-3'-phosphate
  modified_base 10: mod_base = OTHER; note = 2'-fluorocytidine-3'-phosphate
  modified_base 11: mod_base = OTHER; note = 2'-fluoroadenosine-3'-phosphate
  modified_base 12: mod_base = OTHER; note = 2'-O-methyluridine-3'-phosphate
  modified_base 13: mod_base = OTHER; note = 2'-O-methyladenosine-3'-phosphate
  modified_base 14: mod_base = OTHER; note = 2'-O-methyladenosine-3'-phosphate
  modified_base 15: mod_base = OTHER; note = 2'-O-methyluridine-3'-phosphate
  modified_base 16: mod_base = OTHER; note = 2'-O-methylguanosine-3'-phosphate
  modified_base 17: mod_base = OTHER; note = 2'-O-methylguanosine-3'-phosphate
  modified_base 18: mod_base = OTHER; note = 2'-O-methylcytidine-3'-phosphate
  modified_base 19: mod_base = OTHER; note = 2'-O-methyladenosine-3'-phosphate
  modified_base 20: mod_base = OTHER; note = 2'-O-methyladenosine-3'-phosphate
  modified_base 21: mod_base = OTHER; note = 2'-O-methyluridine-3'-phosphate N-[tris(GalNAc-alkyl)-amidodecanoyl)]-4-hydroxyprolinol (Hyp-(GalNAc-alkyl)3)
tacctggatcataatggcaat

SEQ ID NO: 6899 - RNA, 21 nt, synthetic construct
  source 1..21: mol_type = other RNA
  modified_base 1: mod_base = OTHER; note = 2'-O-methyladenosine-3'-phosphorothioate
  modified_base 2: mod_base = OTHER; note = 2'-O-methylcytidine-3'-phosphorothioate
  modified_base 3: mod_base = OTHER; note = 2'-O-methylcytidine-3'-phosphate
  modified_base 4: mod_base = OTHER; note = 2'-O-methyluridine-3'-phosphate
  modified_base 5: mod_base = OTHER; note = 2'-O-methylguanosine-3'-phosphate
  modified_base 6: mod_base = OTHER; note = 2'-O-methylguanosine-3'-phosphate
  modified_base 7: mod_base = OTHER; note = 2'-O-methyladenosine-3'-phosphate
  modified_base 8: mod_base = OTHER; note = 2'-O-methyluridine-3'-phosphate
  modified_base 9: mod_base = OTHER; note = 2'-fluorocytidine-3'-phosphate
  modified_base 10: mod_base = OTHER; note = 2'-fluoroadenosine-3'-phosphate
  modified_base 11: mod_base = OTHER; note = 2'-fluorouridine-3'-phosphate
  modified_base 12: mod_base = OTHER; note = 2'-O-methyladenosine-3'-phosphate
  modified_base 13: mod_base = OTHER; note = 2'-O-methyladenosine-3'-phosphate
  modified_base 14: mod_base = OTHER; note = 2'-O-methyluridine-3'-phosphate
  modified_base 15: mod_base = OTHER; note = 2'-O-methylguanosine-3'-phosphate
  modified_base 16: mod_base = OTHER; note = 2'-O-methylguanosine-3'-phosphate
  modified_base 17: mod_base = OTHER; note = 2'-O-methylcytidine-3'-phosphate
  modified_base 18: mod_base = OTHER; note = 2'-O-methyladenosine-3'-phosphate
  modified_base 19: mod_base = OTHER; note = 2'-O-methyladenosine-3'-phosphate
  modified_base 20: mod_base = OTHER; note = 2'-O-methyluridine-3'-phosphate
  modified_base 21: mod_base = OTHER; note = 2'-O-methyluridine-3'-phosphate N-[tris(GalNAc-alkyl)-amidodecanoyl)]-4-hydroxyprolinol (Hyp-(GalNAc-alkyl)3)
acctggatcataatggcaatt

SEQ ID NO: 6900 - RNA, 21 nt, synthetic construct
  source 1..21: mol_type = other RNA
  modified_base 1: mod_base = OTHER; note = 2'-O-methylcytidine-3'-phosphorothioate
  modified_base 2: mod_base = OTHER; note = 2'-O-methylcytidine-3'-phosphorothioate
  modified_base 3: mod_base = OTHER; note = 2'-O-methyluridine-3'-phosphate
  modified_base 4: mod_base = OTHER; note = 2'-O-methylguanosine-3'-phosphate
  modified_base 5: mod_base = OTHER; note = 2'-O-methylguanosine-3'-phosphate
  modified_base 6: mod_base = OTHER; note = 2'-O-methyladenosine-3'-phosphate
  modified_base 7: mod_base = OTHER; note = 2'-O-methyluridine-3'-phosphate
  modified_base 8: mod_base = OTHER; note = 2'-O-methylcytidine-3'-phosphate
  modified_base 9: mod_base = OTHER; note = 2'-fluoroadenosine-3'-phosphate
  modified_base 10: mod_base = OTHER; note = 2'-fluorouridine-3'-phosphate
  modified_base 11: mod_base = OTHER; note = 2'-fluoroadenosine-3'-phosphate
  modified_base 12: mod_base = OTHER; note = 2'-O-methyladenosine-3'-phosphate
  modified_base 13: mod_base = OTHER; note = 2'-O-methyluridine-3'-phosphate
  modified_base 14: mod_base = OTHER; note = 2'-O-methylguanosine-3'-phosphate
  modified_base 15: mod_base = OTHER; note = 2'-O-methylguanosine-3'-phosphate
  modified_base 16: mod_base = OTHER; note = 2'-O-methylcytidine-3'-phosphate
  modified_base 17: mod_base = OTHER; note = 2'-O-methyladenosine-3'-phosphate
  modified_base 18: mod_base = OTHER; note = 2'-O-methyladenosine-3'-phosphate
  modified_base 19: mod_base = OTHER; note = 2'-O-methyluridine-3'-phosphate
  modified_base 20: mod_base = OTHER; note = 2'-O-methylguanosine-3'-phosphate
  modified_base 21: mod_base = OTHER; note = 2'-O-methyluridine-3'-phosphate N-[tris(GalNAc-alkyl)-amidodecanoyl)]-4-hydroxyprolinol (Hyp-(GalNAc-alkyl)3)
cctggatcataatggcaatgt

SEQ ID NO: 6901 - RNA, 21 nt, synthetic construct
  source 1..21: mol_type = other RNA
  modified_base 1: mod_base = OTHER; note = 2'-O-methylcytidine-3'-phosphorothioate
  modified_base 2: mod_base = OTHER; note = 2'-O-methyluridine-3'-phosphorothioate
  modified_base 3: mod_base = OTHER; note = 2'-O-methylguanosine-3'-phosphate
  modified_base 4: mod_base = OTHER; note = 2'-O-methylguanosine-3'-phosphate
  modified_base 5: mod_base = OTHER; note = 2'-O-methyladenosine-3'-phosphate
  modified_base 6: mod_base = OTHER; note = 2'-O-methyluridine-3'-phosphate
  modified_base 7: mod_base = OTHER; note = 2'-O-methylcytidine-3'-phosphate
  modified_base 8: mod_base = OTHER; note = 2'-O-methyladenosine-3'-phosphate
  modified_base 9: mod_base = OTHER; note = 2'-fluorouridine-3'-phosphate
  modified_base 10: mod_base = OTHER; note = 2'-fluoroadenosine-3'-phosphate
  modified_base 11: mod_base = OTHER; note = 2'-fluoroadenosine-3'-phosphate
  modified_base 12: mod_base = OTHER; note = 2'-O-methyluridine-3'-phosphate
  modified_base 13: mod_base = OTHER; note = 2'-O-methylguanosine-3'-phosphate
  modified_base 14: mod_base = OTHER; note = 2'-O-methylguanosine-3'-phosphate
  modified_base 15: mod_base = OTHER; note = 2'-O-methylcytidine-3'-phosphate
  modified_base 16: mod_base = OTHER; note = 2'-O-methyladenosine-3'-phosphate
  modified_base 17: mod_base = OTHER; note = 2'-O-methyladenosine-3'-phosphate
  modified_base 18: mod_base = OTHER; note = 2'-O-methyluridine-3'-phosphate
  modified_base 19: mod_base = OTHER; note = 2'-O-methylguanosine-3'-phosphate
  modified_base 20: mod_base = OTHER; note = 2'-O-methyluridine-3'-phosphate
  modified_base 21: mod_base = OTHER; note = 2'-O-methyluridine-3'-phosphate N-[tris(GalNAc-alkyl)-amidodecanoyl)]-4-hydroxyprolinol (Hyp-(GalNAc-alkyl)3)
ctggatcataatggcaatgtt

SEQ ID NO: 6902 - RNA, 21 nt, synthetic construct
  source 1..21: mol_type = other RNA
  modified_base 1: mod_base = OTHER; note = 2'-O-methyluridine-3'-phosphorothioate
  modified_base 2: mod_base = OTHER; note = 2'-O-methylguanosine-3'-phosphorothioate
  modified_base 3: mod_base = OTHER; note = 2'-O-methylguanosine-3'-phosphate
  modified_base 4: mod_base = OTHER; note = 2'-O-methyladenosine-3'-phosphate
  modified_base 5: mod_base = OTHER; note = 2'-O-methyluridine-3'-phosphate
  modified_base 6: mod_base = OTHER; note = 2'-O-methylcytidine-3'-phosphate
  modified_base 7: mod_base = OTHER; note = 2'-O-methyladenosine-3'-phosphate
  modified_base 8: mod_base = OTHER; note = 2'-O-methyluridine-3'-phosphate
  modified_base 9: mod_base = OTHER; note = 2'-fluoroadenosine-3'-phosphate
  modified_base 10: mod_base = OTHER; note = 2'-fluoroadenosine-3'-phosphate
  modified_base 11: mod_base = OTHER; note = 2'-fluorouridine-3'-phosphate
  modified_base 12: mod_base = OTHER; note = 2'-O-methylguanosine-3'-phosphate
  modified_base 13: mod_base = OTHER; note = 2'-O-methylguanosine-3'-phosphate
  modified_base 14: mod_base = OTHER; note = 2'-O-methylcytidine-3'-phosphate
  modified_base 15: mod_base = OTHER; note = 2'-O-methyladenosine-3'-phosphate
  modified_base 16: mod_base = OTHER; note = 2'-O-methyladenosine-3'-phosphate
  modified_base 17: mod_base = OTHER; note = 2'-O-methyluridine-3'-phosphate
  modified_base 18: mod_base = OTHER; note = 2'-O-methylguanosine-3'-phosphate
  modified_base 19: mod_base = OTHER; note = 2'-O-methyluridine-3'-phosphate
  modified_base 20: mod_base = OTHER; note = 2'-O-methylguanosine-3'-phosphate
  modified_base 21: mod_base = OTHER; note = 2'-O-methyluridine-3'-phosphate N-[tris(GalNAc-alkyl)-amidodecanoyl)]-4-hydroxyprolinol (Hyp-(GalNAc-alkyl)3)
tggatcataatggcaatgtgt

SEQ ID NO: 6903 - RNA, 21 nt, synthetic construct
  source 1..21: mol_type = other RNA
  modified_base 1: mod_base = OTHER; note = 2'-O-methylguanosine-3'-phosphorothioate
  modified_base 2: mod_base = OTHER; note = 2'-O-methylguanosine-3'-phosphorothioate
  modified_base 3: mod_base = OTHER; note = 2'-O-methyladenosine-3'-phosphate
  modified_base 4: mod_base = OTHER; note = 2'-O-methyluridine-3'-phosphate
  modified_base 5: mod_base = OTHER; note = 2'-O-methylcytidine-3'-phosphate
  modified_base 6: mod_base = OTHER; note = 2'-O-methyladenosine-3'-phosphate
  modified_base 7: mod_base = OTHER; note = 2'-O-methyluridine-3'-phosphate
  modified_base 8: mod_base = OTHER; note = 2'-O-methyladenosine-3'-phosphate
  modified_base 9: mod_base = OTHER; note = 2'-fluoroadenosine-3'-phosphate
  modified_base 10: mod_base = OTHER; note = 2'-fluorouridine-3'-phosphate
  modified_base 11: mod_base = OTHER; note = 2'-fluoroguanosine-3'-phosphate
  modified_base 12: mod_base = OTHER; note = 2'-O-methylguanosine-3'-phosphate
  modified_base 13: mod_base = OTHER; note = 2'-O-methylcytidine-3'-phosphate
  modified_base 14: mod_base = OTHER; note = 2'-O-methyladenosine-3'-phosphate
  modified_base 15: mod_base = OTHER; note = 2'-O-methyladenosine-3'-phosphate
  modified_base 16: mod_base = OTHER; note = 2'-O-methyluridine-3'-phosphate
  modified_base 17: mod_base = OTHER; note = 2'-O-methylguanosine-3'-phosphate
  modified_base 18: mod_base = OTHER; note = 2'-O-methyluridine-3'-phosphate
  modified_base 19: mod_base = OTHER; note = 2'-O-methylguanosine-3'-phosphate
  modified_base 20: mod_base = OTHER; note = 2'-O-methylguanosine-3'-phosphate
  modified_base 21: mod_base = OTHER; note = 2'-O-methyluridine-3'-phosphate N-[tris(GalNAc-alkyl)-amidodecanoyl)]-4-hydroxyprolinol (Hyp-(GalNAc-alkyl)3)
ggatcataatggcaatgtggt

SEQ ID NO: 6904 - RNA, 21 nt, synthetic construct
  source 1..21: mol_type = other RNA
  modified_base 1: mod_base = OTHER; note = 2'-O-methylguanosine-3'-phosphorothioate
  modified_base 2: mod_base = OTHER; note = 2'-O-methyladenosine-3'-phosphorothioate
  modified_base 3: mod_base = OTHER; note = 2'-O-methyluridine-3'-phosphate
  modified_base 4: mod_base = OTHER; note = 2'-O-methylcytidine-3'-phosphate
  modified_base 5: mod_base = OTHER; note = 2'-O-methyladenosine-3'-phosphate
  modified_base 6: mod_base = OTHER; note = 2'-O-methyluridine-3'-phosphate
  modified_base 7: mod_base = OTHER; note = 2'-O-methyladenosine-3'-phosphate
  modified_base 8: mod_base = OTHER; note = 2'-O-methyladenosine-3'-phosphate
  modified_base 9: mod_base = OTHER; note = 2'-fluorouridine-3'-phosphate
  modified_base 10: mod_base = OTHER; note = 2'-fluoroguanosine-3'-phosphate
  modified_base 11: mod_base = OTHER; note = 2'-fluoroguanosine-3'-phosphate
  modified_base 12: mod_base = OTHER; note = 2'-O-methylcytidine-3'-phosphate
  modified_base 13: mod_base = OTHER; note = 2'-O-methyladenosine-3'-phosphate
  modified_base 14: mod_base = OTHER; note = 2'-O-methyladenosine-3'-phosphate
  modified_base 15: mod_base = OTHER; note = 2'-O-methyluridine-3'-phosphate
  modified_base 16: mod_base = OTHER; note = 2'-O-methylguanosine-3'-phosphate
  modified_base 17: mod_base = OTHER; note = 2'-O-methyluridine-3'-phosphate
  modified_base 18: mod_base = OTHER; note = 2'-O-methylguanosine-3'-phosphate
  modified_base 19: mod_base = OTHER; note = 2'-O-methylguanosine-3'-phosphate
  modified_base 20: mod_base = OTHER; note = 2'-O-methyluridine-3'-phosphate
  modified_base 21: mod_base = OTHER; note = 2'-O-methyluridine-3'-phosphate N-[tris(GalNAc-alkyl)-amidodecanoyl)]-4-hydroxyprolinol (Hyp-(GalNAc-alkyl)3)
gatcataatggcaatgtggtt

SEQ ID NO: 6905 - RNA, 21 nt, synthetic construct
  source 1..21: mol_type = other RNA
  modified_base 1: mod_base = OTHER; note = 2'-O-methyladenosine-3'-phosphorothioate
  modified_base 2: mod_base = OTHER; note = 2'-O-methyluridine-3'-phosphorothioate
  modified_base 3: mod_base = OTHER; note = 2'-O-methylcytidine-3'-phosphate
  modified_base 4: mod_base = OTHER; note = 2'-O-methyladenosine-3'-phosphate
  modified_base 5: mod_base = OTHER; note = 2'-O-methyluridine-3'-phosphate
  modified_base 6: mod_base = OTHER; note = 2'-O-methyladenosine-3'-phosphate
  modified_base 7: mod_base = OTHER; note = 2'-O-methyladenosine-3'-phosphate
  modified_base 8: mod_base = OTHER; note = 2'-O-methyluridine-3'-phosphate
  modified_base 9: mod_base = OTHER; note = 2'-fluoroguanosine-3'-phosphate
  modified_base 10: mod_base = OTHER; note = 2'-fluoroguanosine-3'-phosphate
  modified_base 11: mod_base = OTHER; note = 2'-fluorocytidine-3'-phosphate
  modified_base 12: mod_base = OTHER; note = 2'-O-methyladenosine-3'-phosphate
  modified_base 13: mod_base = OTHER; note = 2'-O-methyladenosine-3'-phosphate
  modified_base 14: mod_base = OTHER; note = 2'-O-methyluridine-3'-phosphate
  modified_base 15: mod_base = OTHER; note = 2'-O-methylguanosine-3'-phosphate
  modified_base 16: mod_base = OTHER; note = 2'-O-methyluridine-3'-phosphate
  modified_base 17: mod_base = OTHER; note = 2'-O-methylguanosine-3'-phosphate
  modified_base 18: mod_base = OTHER; note = 2'-O-methylguanosine-3'-phosphate
  modified_base 19: mod_base = OTHER; note = 2'-O-methyluridine-3'-phosphate
  modified_base 20: mod_base = OTHER; note = 2'-O-methylcytidine-3'-phosphate
  modified_base 21: mod_base = OTHER; note = 2'-O-methyluridine-3'-phosphate N-[tris(GalNAc-alkyl)-amidodecanoyl)]-4-hydroxyprolinol (Hyp-(GalNAc-alkyl)3)
atcataatggcaatgtggtct

SEQ ID NO: 6906 - RNA, 21 nt, synthetic construct
  source 1..21: mol_type = other RNA
  modified_base 1: mod_base = OTHER; note = 2'-O-methyluridine-3'-phosphorothioate
  modified_base 2: mod_base = OTHER; note = 2'-O-methylcytidine-3'-phosphorothioate
  modified_base 3: mod_base = OTHER; note = 2'-O-methyladenosine-3'-phosphate
  modified_base 4: mod_base = OTHER; note = 2'-O-methyluridine-3'-phosphate
  modified_base 5: mod_base = OTHER; note = 2'-O-methyladenosine-3'-phosphate
  modified_base 6: mod_base = OTHER; note = 2'-O-methyladenosine-3'-phosphate
  modified_base 7: mod_base = OTHER; note = 2'-O-methyluridine-3'-phosphate
  modified_base 8: mod_base = OTHER; note = 2'-O-methylguanosine-3'-phosphate
  modified_base 9: mod_base = OTHER; note = 2'-fluoroguanosine-3'-phosphate
  modified_base 10: mod_base = OTHER; note = 2'-fluorocytidine-3'-phosphate
  modified_base 11: mod_base = OTHER; note = 2'-fluoroadenosine-3'-phosphate
  modified_base 12: mod_base = OTHER; note = 2'-O-methyladenosine-3'-phosphate
  modified_base 13: mod_base = OTHER; note = 2'-O-methyluridine-3'-phosphate
  modified_base 14: mod_base = OTHER; note = 2'-O-methylguanosine-3'-phosphate
  modified_base 15: mod_base = OTHER; note = 2'-O-methyluridine-3'-phosphate
  modified_base 16: mod_base = OTHER; note = 2'-O-methylguanosine-3'-phosphate
  modified_base 17: mod_base = OTHER; note = 2'-O-methylguanosine-3'-phosphate
  modified_base 18: mod_base = OTHER; note = 2'-O-methyluridine-3'-phosphate
  modified_base 19: mod_base = OTHER; note = 2'-O-methylcytidine-3'-phosphate
  modified_base 20: mod_base = OTHER; note = 2'-O-methyladenosine-3'-phosphate
  modified_base 21: mod_base = OTHER; note = 2'-O-methyluridine-3'-phosphate N-[tris(GalNAc-alkyl)-amidodecanoyl)]-4-hydroxyprolinol (Hyp-(GalNAc-alkyl)3)
tcataatggcaatgtggtcat

SEQ ID NO: 6907 - RNA, 21 nt, synthetic construct
  source 1..21: mol_type = other RNA
  modified_base 1: mod_base = OTHER; note = 2'-O-methylcytidine-3'-phosphorothioate
  modified_base 2: mod_base = OTHER; note = 2'-O-methyladenosine-3'-phosphorothioate
  modified_base 3: mod_base = OTHER; note = 2'-O-methyluridine-3'-phosphate
  modified_base 4: mod_base = OTHER; note = 2'-O-methyladenosine-3'-phosphate
  modified_base 5: mod_base = OTHER; note = 2'-O-methyladenosine-3'-phosphate
  modified_base 6: mod_base = OTHER; note = 2'-O-methyluridine-3'-phosphate
  modified_base 7: mod_base = OTHER; note = 2'-O-methylguanosine-3'-phosphate
  modified_base 8: mod_base = OTHER; note = 2'-O-methylguanosine-3'-phosphate
  modified_base 9: mod_base = OTHER; note = 2'-fluorocytidine-3'-phosphate
  modified_base 10: mod_base = OTHER; note = 2'-fluoroadenosine-3'-phosphate
  modified_base 11: mod_base = OTHER; note = 2'-fluoroadenosine-3'-phosphate
  modified_base 12: mod_base = OTHER; note = 2'-O-methyluridine-3'-phosphate
  modified_base 13: mod_base = OTHER; note = 2'-O-methylguanosine-3'-phosphate
  modified_base 14: mod_base = OTHER; note = 2'-O-methyluridine-3'-phosphate
  modified_base 15: mod_base = OTHER; note = 2'-O-methylguanosine-3'-phosphate
  modified_base 16: mod_base = OTHER; note = 2'-O-methylguanosine-3'-phosphate
  modified_base 17: mod_base = OTHER; note = 2'-O-methyluridine-3'-phosphate
  modified_base 18: mod_base = OTHER; note = 2'-O-methylcytidine-3'-phosphate
  modified_base 19: mod_base = OTHER; note = 2'-O-methyladenosine-3'-phosphate
  modified_base 20: mod_base = OTHER; note = 2'-O-methyladenosine-3'-phosphate
  modified_base 21: mod_base = OTHER; note = 2'-O-methyluridine-3'-phosphate N-[tris(GalNAc-alkyl)-amidodecanoyl)]-4-hydroxyprolinol (Hyp-(GalNAc-alkyl)3)
cataatggcaatgtggtcaat

SEQ ID NO: 6908 - RNA, 21 nt, synthetic construct
  source 1..21: mol_type = other RNA
  modified_base 1: mod_base = OTHER; note = 2'-O-methyladenosine-3'-phosphorothioate
  modified_base 2: mod_base = OTHER; note = 2'-O-methyluridine-3'-phosphorothioate
  modified_base 3: mod_base = OTHER; note = 2'-O-methyladenosine-3'-phosphate
  modified_base 4: mod_base = OTHER; note = 2'-O-methyladenosine-3'-phosphate
  modified_base 5: mod_base = OTHER; note = 2'-O-methyluridine-3'-phosphate
  modified_base 6: mod_base = OTHER; note = 2'-O-methylguanosine-3'-phosphate
  modified_base 7: mod_base = OTHER; note = 2'-O-methylguanosine-3'-phosphate
  modified_base 8: mod_base = OTHER; note = 2'-O-methylcytidine-3'-phosphate
  modified_base 9: mod_base = OTHER; note = 2'-fluoroadenosine-3'-phosphate
  modified_base 10: mod_base = OTHER; note = 2'-fluoroadenosine-3'-phosphate
  modified_base 11: mod_base = OTHER; note = 2'-fluorouridine-3'-phosphate
  modified_base 12: mod_base = OTHER; note = 2'-O-methylguanosine-3'-phosphate
  modified_base 13: mod_base = OTHER; note = 2'-O-methyluridine-3'-phosphate
  modified_base 14: mod_base = OTHER; note = 2'-O-methylguanosine-3'-phosphate
  modified_base 15: mod_base = OTHER; note = 2'-O-methylguanosine-3'-phosphate
  modified_base 16: mod_base = OTHER; note = 2'-O-methyluridine-3'-phosphate
  modified_base 17: mod_base = OTHER; note = 2'-O-methylcytidine-3'-phosphate
  modified_base 18: mod_base = OTHER; note = 2'-O-methyladenosine-3'-phosphate
  modified_base 19: mod_base = OTHER; note = 2'-O-methyladenosine-3'-phosphate
  modified_base 20: mod_base = OTHER; note = 2'-O-methylguanosine-3'-phosphate
  modified_base 21: mod_base = OTHER; note = 2'-O-methyluridine-3'-phosphate N-[tris(GalNAc-alkyl)-amidodecanoyl)]-4-hydroxyprolinol (Hyp-(GalNAc-alkyl)3)
ataatggcaatgtggtcaagt

SEQ ID NO: 6909 - RNA, 21 nt, synthetic construct
  source 1..21: mol_type = other RNA
  modified_base 1: mod_base = OTHER; note = 2'-O-methyluridine-3'-phosphorothioate
  modified_base 2: mod_base = OTHER; note = 2'-O-methyladenosine-3'-phosphorothioate
  modified_base 3: mod_base = OTHER; note = 2'-O-methyladenosine-3'-phosphate
  modified_base 4: mod_base = OTHER; note = 2'-O-methyluridine-3'-phosphate
  modified_base 5: mod_base = OTHER; note = 2'-O-methylguanosine-3'-phosphate
  modified_base 6: mod_base = OTHER; note = 2'-O-methylguanosine-3'-phosphate
  modified_base 7: mod_base = OTHER; note = 2'-O-methylcytidine-3'-phosphate
  modified_base 8: mod_base = OTHER; note = 2'-O-methyladenosine-3'-phosphate
  modified_base 9: mod_base = OTHER; note = 2'-fluoroadenosine-3'-phosphate
  modified_base 10: mod_base = OTHER; note = 2'-fluorouridine-3'-phosphate
  modified_base 11: mod_base = OTHER; note = 2'-fluoroguanosine-3'-phosphate
  modified_base 12: mod_base = OTHER; note = 2'-O-methyluridine-3'-phosphate
  modified_base 13: mod_base = OTHER; note = 2'-O-methylguanosine-3'-phosphate
  modified_base 14: mod_base = OTHER; note = 2'-O-methylguanosine-3'-phosphate
  modified_base 15: mod_base = OTHER; note = 2'-O-methyluridine-3'-phosphate
  modified_base 16: mod_base = OTHER; note = 2'-O-methylcytidine-3'-phosphate
  modified_base 17: mod_base = OTHER; note = 2'-O-methyladenosine-3'-phosphate
  modified_base 18: mod_base = OTHER; note = 2'-O-methyladenosine-3'-phosphate
  modified_base 19: mod_base = OTHER; note = 2'-O-methylguanosine-3'-phosphate
  modified_base 20: mod_base = OTHER; note = 2'-O-methyladenosine-3'-phosphate
  modified_base 21: mod_base = OTHER; note = 2'-O-methyluridine-3'-phosphate N-[tris(GalNAc-alkyl)-amidodecanoyl)]-4-hydroxyprolinol (Hyp-(GalNAc-alkyl)3)
taatggcaatgtggtcaagat

SEQ ID NO: 6910 - RNA, 21 nt, synthetic construct
  source 1..21: mol_type = other RNA
  modified_base 1: mod_base = OTHER; note = 2'-O-methyladenosine-3'-phosphorothioate
  modified_base 2: mod_base = OTHER; note = 2'-O-methyladenosine-3'-phosphorothioate
  modified_base 3: mod_base = OTHER; note = 2'-O-methyluridine-3'-phosphate
  modified_base 4: mod_base = OTHER; note = 2'-O-methylguanosine-3'-phosphate
  modified_base 5: mod_base = OTHER; note = 2'-O-methylguanosine-3'-phosphate
  modified_base 6: mod_base = OTHER; note = 2'-O-methylcytidine-3'-phosphate
  modified_base 7: mod_base = OTHER; note = 2'-O-methyladenosine-3'-phosphate
  modified_base 8: mod_base = OTHER; note = 2'-O-methyladenosine-3'-phosphate
  modified_base 9: mod_base = OTHER; note = 2'-fluorouridine-3'-phosphate
  modified_base 10: mod_base = OTHER; note = 2'-fluoroguanosine-3'-phosphate
  modified_base 11: mod_base = OTHER; note = 2'-fluorouridine-3'-phosphate
  modified_base 12: mod_base = OTHER; note = 2'-O-methylguanosine-3'-phosphate
  modified_base 13: mod_base = OTHER; note = 2'-O-methylguanosine-3'-phosphate
  modified_base 14: mod_base = OTHER; note = 2'-O-methyluridine-3'-phosphate
  modified_base 15: mod_base = OTHER; note = 2'-O-methylcytidine-3'-phosphate
  modified_base 16: mod_base = OTHER; note = 2'-O-methyladenosine-3'-phosphate
  modified_base 17: mod_base = OTHER; note = 2'-O-methyladenosine-3'-phosphate
  modified_base 18: mod_base = OTHER; note = 2'-O-methylguanosine-3'-phosphate
  modified_base 19: mod_base = OTHER; note = 2'-O-methyladenosine-3'-phosphate
  modified_base 20: mod_base = OTHER; note = 2'-O-methylcytidine-3'-phosphate
  modified_base 21: mod_base = OTHER; note = 2'-O-methyluridine-3'-phosphate N-[tris(GalNAc-alkyl)-amidodecanoyl)]-4-hydroxyprolinol (Hyp-(GalNAc-alkyl)3)
aatggcaatgtggtcaagact

SEQ ID NO: 6911 - RNA, 21 nt, synthetic construct
  source 1..21: mol_type = other RNA
  modified_base 1: mod_base = OTHER; note = 2'-O-methyladenosine-3'-phosphorothioate
  modified_base 2: mod_base = OTHER; note = 2'-O-methyluridine-3'-phosphorothioate
  modified_base 3: mod_base = OTHER; note = 2'-O-methylguanosine-3'-phosphate
  modified_base 4: mod_base = OTHER; note = 2'-O-methylguanosine-3'-phosphate
  modified_base 5: mod_base = OTHER; note = 2'-O-methylcytidine-3'-phosphate
  modified_base 6: mod_base = OTHER; note = 2'-O-methyladenosine-3'-phosphate
  modified_base 7: mod_base = OTHER; note = 2'-O-methyladenosine-3'-phosphate
  modified_base 8: mod_base = OTHER; note = 2'-O-methyluridine-3'-phosphate
  modified_base 9: mod_base = OTHER; note = 2'-fluoroguanosine-3'-phosphate
  modified_base 10: mod_base = OTHER; note = 2'-fluorouridine-3'-phosphate
  modified_base 11: mod_base = OTHER; note = 2'-fluoroguanosine-3'-phosphate
  modified_base 12: mod_base = OTHER; note = 2'-O-methylguanosine-3'-phosphate
  modified_base 13: mod_base = OTHER; note = 2'-O-methyluridine-3'-phosphate
  modified_base 14: mod_base = OTHER; note = 2'-O-methylcytidine-3'-phosphate
  modified_base 15: mod_base = OTHER; note = 2'-O-methyladenosine-3'-phosphate
  modified_base 16: mod_base = OTHER; note = 2'-O-methyladenosine-3'-phosphate
  modified_base 17: mod_base = OTHER; note = 2'-O-methylguanosine-3'-phosphate
  modified_base 18: mod_base = OTHER; note = 2'-O-methyladenosine-3'-phosphate
  modified_base 19: mod_base = OTHER; note = 2'-O-methylcytidine-3'-phosphate
  modified_base 20: mod_base = OTHER; note = 2'-O-methylguanosine-3'-phosphate
  modified_base 21: mod_base = OTHER; note = 2'-O-methyluridine-3'-phosphate N-[tris(GalNAc-alkyl)-amidodecanoyl)]-4-hydroxyprolinol (Hyp-(GalNAc-alkyl)3)
atggcaatgtggtcaagacgt

SEQ ID NO: 6912 - RNA, 21 nt, synthetic construct
  source 1..21: mol_type = other RNA
  modified_base 1: mod_base = OTHER; note = 2'-O-methyluridine-3'-phosphorothioate
  modified_base 2: mod_base = OTHER; note = 2'-O-methylguanosine-3'-phosphorothioate
  modified_base 3: mod_base = OTHER; note = 2'-O-methylguanosine-3'-phosphate
  modified_base 4: mod_base = OTHER; note = 2'-O-methylcytidine-3'-phosphate
  modified_base 5: mod_base = OTHER; note = 2'-O-methyladenosine-3'-phosphate
  modified_base 6: mod_base = OTHER; note = 2'-O-methyladenosine-3'-phosphate
  modified_base 7: mod_base = OTHER; note = 2'-O-methyluridine-3'-phosphate
  modified_base 8: mod_base = OTHER; note = 2'-O-methylguanosine-3'-phosphate
  modified_base 9: mod_base = OTHER; note = 2'-fluorouridine-3'-phosphate
  modified_base 10: mod_base = OTHER; note = 2'-fluoroguanosine-3'-phosphate
  modified_base 11: mod_base = OTHER; note = 2'-fluoroguanosine-3'-phosphate
  modified_base 12: mod_base = OTHER; note = 2'-O-methyluridine-3'-phosphate
  modified_base 13: mod_base = OTHER; note = 2'-O-methylcytidine-3'-phosphate
  modified_base 14: mod_base = OTHER; note = 2'-O-methyladenosine-3'-phosphate
  modified_base 15: mod_base = OTHER; note = 2'-O-methyladenosine-3'-phosphate
  modified_base 16: mod_base = OTHER; note = 2'-O-methylguanosine-3'-phosphate
  modified_base 17: mod_base = OTHER; note = 2'-O-methyladenosine-3'-phosphate
  modified_base 18: mod_base = OTHER; note = 2'-O-methylcytidine-3'-phosphate
  modified_base 19: mod_base = OTHER; note = 2'-O-methylguanosine-3'-phosphate
  modified_base 20: mod_base = OTHER; note = 2'-O-methylguanosine-3'-phosphate
  modified_base 21: mod_base = OTHER; note = 2'-O-methyluridine-3'-phosphate N-[tris(GalNAc-alkyl)-amidodecanoyl)]-4-hydroxyprolinol (Hyp-(GalNAc-alkyl)3)
tggcaatgtggtcaagacggt

SEQ ID NO: 6913 - RNA, 21 nt, synthetic construct
  source 1..21: mol_type = other RNA
  modified_base 1: mod_base = OTHER; note = 2'-O-methylguanosine-3'-phosphorothioate
  modified_base 2: mod_base = OTHER; note = 2'-O-methylguanosine-3'-phosphorothioate
  modified_base 3: mod_base = OTHER; note = 2'-O-methylcytidine-3'-phosphate
  modified_base 4: mod_base = OTHER; note = 2'-O-methyladenosine-3'-phosphate
  modified_base 5: mod_base = OTHER; note = 2'-O-methyladenosine-3'-phosphate
  modified_base 6: mod_base = OTHER; note = 2'-O-methyluridine-3'-phosphate
  modified_base 7: mod_base = OTHER; note = 2'-O-methylguanosine-3'-phosphate
  modified_base 8: mod_base = OTHER; note = 2'-O-methyluridine-3'-phosphate
  modified_base 9: mod_base = OTHER; note = 2'-fluoroguanosine-3'-phosphate
  modified_base 10: mod_base = OTHER; note = 2'-fluoroguanosine-3'-phosphate
  modified_base 11: mod_base = OTHER; note = 2'-fluorouridine-3'-phosphate
  modified_base 12: mod_base = OTHER; note = 2'-O-methylcytidine-3'-phosphate
  modified_base 13: mod_base = OTHER; note = 2'-O-methyladenosine-3'-phosphate
  modified_base 14: mod_base = OTHER; note = 2'-O-methyladenosine-3'-phosphate
  modified_base 15: mod_base = OTHER; note = 2'-O-methylguanosine-3'-phosphate
  modified_base 16: mod_base = OTHER; note = 2'-O-methyladenosine-3'-phosphate
  modified_base 17: mod_base = OTHER; note = 2'-O-methylcytidine-3'-phosphate
  modified_base 18: mod_base = OTHER; note = 2'-O-methylguanosine-3'-phosphate
  modified_base 19: mod_base = OTHER; note = 2'-O-methylguanosine-3'-phosphate
  modified_base 20: mod_base = OTHER; note = 2'-O-methyladenosine-3'-phosphate
  modified_base 21: mod_base = OTHER; note = 2'-O-methyluridine-3'-phosphate N-[tris(GalNAc-alkyl)-amidodecanoyl)]-4-hydroxyprolinol (Hyp-(GalNAc-alkyl)3)
ggcaatgtggtcaagacggat

SEQ ID NO: 6914 - RNA, 21 nt, synthetic construct
  source 1..21: mol_type = other RNA
  modified_base 1: mod_base = OTHER; note = 2'-O-methylguanosine-3'-phosphorothioate
  modified_base 2: mod_base = OTHER; note = 2'-O-methylcytidine-3'-phosphorothioate
  modified_base 3: mod_base = OTHER; note = 2'-O-methyladenosine-3'-phosphate
  modified_base 4: mod_base = OTHER; note = 2'-O-methyladenosine-3'-phosphate
  modified_base 5: mod_base = OTHER; note = 2'-O-methyluridine-3'-phosphate
  modified_base 6: mod_base = OTHER; note = 2'-O-methylguanosine-3'-phosphate
  modified_base 7: mod_base = OTHER; note = 2'-O-methyluridine-3'-phosphate
  modified_base 8: mod_base = OTHER; note = 2'-O-methylguanosine-3'-phosphate
  modified_base 9: mod_base = OTHER; note = 2'-fluoroguanosine-3'-phosphate
  modified_base 10: mod_base = OTHER; note = 2'-fluorouridine-3'-phosphate
  modified_base 11: mod_base = OTHER; note = 2'-fluorocytidine-3'-phosphate
  modified_base 12: mod_base = OTHER; note = 2'-O-methyladenosine-3'-phosphate
  modified_base 13: mod_base = OTHER; note = 2'-O-methyladenosine-3'-phosphate
  modified_base 14: mod_base = OTHER; note = 2'-O-methylguanosine-3'-phosphate
  modified_base 15: mod_base = OTHER; note = 2'-O-methyladenosine-3'-phosphate
  modified_base 16: mod_base = OTHER; note = 2'-O-methylcytidine-3'-phosphate
  modified_base 17: mod_base = OTHER; note = 2'-O-methylguanosine-3'-phosphate
  modified_base 18: mod_base = OTHER; note = 2'-O-methylguanosine-3'-phosphate
  modified_base 19: mod_base = OTHER; note = 2'-O-methyladenosine-3'-phosphate
  modified_base 20: mod_base = OTHER; note = 2'-O-methyluridine-3'-phosphate
  modified_base 21: mod_base = OTHER; note = 2'-O-methyluridine-3'-phosphate N-[tris(GalNAc-alkyl)-amidodecanoyl)]-4-hydroxyprolinol (Hyp-(GalNAc-alkyl)3)
gcaatgtggtcaagacggatt

SEQ ID NO: 6915 - RNA, 21 nt, synthetic construct
  source 1..21: mol_type = other RNA
  modified_base 1: mod_base = OTHER; note = 2'-O-methylcytidine-3'-phosphorothioate
  modified_base 2: mod_base = OTHER; note = 2'-O-methyladenosine-3'-phosphorothioate
  modified_base 3: mod_base = OTHER; note = 2'-O-methyladenosine-3'-phosphate
  modified_base 4: mod_base = OTHER; note = 2'-O-methyluridine-3'-phosphate
  modified_base 5: mod_base = OTHER; note = 2'-O-methylguanosine-3'-phosphate
  modified_base 6: mod_base = OTHER; note = 2'-O-methyluridine-3'-phosphate
  modified_base 7: mod_base = OTHER; note = 2'-O-methylguanosine-3'-phosphate
  modified_base 8: mod_base = OTHER; note = 2'-O-methylguanosine-3'-phosphate
  modified_base 9: mod_base = OTHER; note = 2'-fluorouridine-3'-phosphate
  modified_base 10: mod_base = OTHER; note = 2'-fluorocytidine-3'-phosphate
  modified_base 11: mod_base = OTHER; note = 2'-fluoroadenosine-3'-phosphate
  modified_base 12: mod_base = OTHER; note = 2'-O-methyladenosine-3'-phosphate
  modified_base 13: mod_base = OTHER; note = 2'-O-methylguanosine-3'-phosphate
  modified_base 14: mod_base = OTHER; note = 2'-O-methyladenosine-3'-phosphate
  modified_base 15: mod_base = OTHER; note = 2'-O-methylcytidine-3'-phosphate
  modified_base 16: mod_base = OTHER; note = 2'-O-methylguanosine-3'-phosphate
  modified_base 17: mod_base = OTHER; note = 2'-O-methylguanosine-3'-phosphate
  modified_base 18: mod_base = OTHER; note = 2'-O-methyladenosine-3'-phosphate
  modified_base 19: mod_base = OTHER; note = 2'-O-methyluridine-3'-phosphate
  modified_base 20: mod_base = OTHER; note = 2'-O-methylguanosine-3'-phosphate
  modified_base 21: mod_base = OTHER; note = 2'-O-methyluridine-3'-phosphate N-[tris(GalNAc-alkyl)-amidodecanoyl)]-4-hydroxyprolinol (Hyp-(GalNAc-alkyl)3)
caatgtggtcaagacggatgt

SEQ ID NO: 6916 - RNA, 21 nt, synthetic construct
  source 1..21: mol_type = other RNA
  modified_base 1: mod_base = OTHER; note = 2'-O-methyladenosine-3'-phosphorothioate
  modified_base 2: mod_base = OTHER; note = 2'-O-methyladenosine-3'-phosphorothioate
  modified_base 3: mod_base = OTHER; note = 2'-O-methyluridine-3'-phosphate
  modified_base 4: mod_base = OTHER; note = 2'-O-methylguanosine-3'-phosphate
  modified_base 5: mod_base = OTHER; note = 2'-O-methyluridine-3'-phosphate
  modified_base 6: mod_base = OTHER; note = 2'-O-methylguanosine-3'-phosphate
  modified_base 7: mod_base = OTHER; note = 2'-O-methylguanosine-3'-phosphate
  modified_base 8: mod_base = OTHER; note = 2'-O-methyluridine-3'-phosphate
  modified_base 9: mod_base = OTHER; note = 2'-fluorocytidine-3'-phosphate
  modified_base 10: mod_base = OTHER; note = 2'-fluoroadenosine-3'-phosphate
  modified_base 11: mod_base = OTHER; note = 2'-fluoroadenosine-3'-phosphate
  modified_base 12: mod_base = OTHER; note = 2'-O-methylguanosine-3'-phosphate
  modified_base 13: mod_base = OTHER; note = 2'-O-methyladenosine-3'-phosphate
  modified_base 14: mod_base = OTHER; note = 2'-O-methylcytidine-3'-phosphate
  modified_base 15: mod_base = OTHER; note = 2'-O-methylguanosine-3'-phosphate
  modified_base 16: mod_base = OTHER; note = 2'-O-methylguanosine-3'-phosphate
  modified_base 17: mod_base = OTHER; note = 2'-O-methyladenosine-3'-phosphate
  modified_base 18: mod_base = OTHER; note = 2'-O-methyluridine-3'-phosphate
  modified_base 19: mod_base = OTHER; note = 2'-O-methylguanosine-3'-phosphate
  modified_base 20: mod_base = OTHER; note = 2'-O-methyluridine-3'-phosphate
  modified_base 21: mod_base = OTHER; note = 2'-O-methyluridine-3'-phosphate N-[tris(GalNAc-alkyl)-amidodecanoyl)]-4-hydroxyprolinol (Hyp-(GalNAc-alkyl)3)
aatgtggtcaagacggatgtt

SEQ ID NO: 6917 - RNA, 21 nt, synthetic construct
  source 1..21: mol_type = other RNA
  modified_base 1: mod_base = OTHER; note = 2'-O-methyladenosine-3'-phosphorothioate
  modified_base 2: mod_base = OTHER; note = 2'-O-methyluridine-3'-phosphorothioate
  modified_base 3: mod_base = OTHER; note = 2'-O-methylguanosine-3'-phosphate
  modified_base 4: mod_base = OTHER; note = 2'-O-methyluridine-3'-phosphate
  modified_base 5: mod_base = OTHER; note = 2'-O-methylguanosine-3'-phosphate
  modified_base 6: mod_base = OTHER; note = 2'-O-methylguanosine-3'-phosphate
  modified_base 7: mod_base = OTHER; note = 2'-O-methyluridine-3'-phosphate
  modified_base 8: mod_base = OTHER; note = 2'-O-methylcytidine-3'-phosphate
  modified_base 9: mod_base = OTHER; note = 2'-fluoroadenosine-3'-phosphate
  modified_base 10: mod_base = OTHER; note = 2'-fluoroadenosine-3'-phosphate
  modified_base 11: mod_base = OTHER; note = 2'-fluoroguanosine-3'-phosphate
  modified_base 12: mod_base = OTHER; note = 2'-O-methyladenosine-3'-phosphate
  modified_base 13: mod_base = OTHER; note = 2'-O-methylcytidine-3'-phosphate
  modified_base 14: mod_base = OTHER; note = 2'-O-methylguanosine-3'-phosphate
  modified_base 15: mod_base = OTHER; note = 2'-O-methylguanosine-3'-phosphate
  modified_base 16: mod_base = OTHER; note = 2'-O-methyladenosine-3'-phosphate
  modified_base 17: mod_base = OTHER; note = 2'-O-methyluridine-3'-phosphate
  modified_base 18: mod_base = OTHER; note = 2'-O-methylguanosine-3'-phosphate
  modified_base 19: mod_base = OTHER; note = 2'-O-methyluridine-3'-phosphate
  modified_base 20: mod_base = OTHER; note = 2'-O-methylguanosine-3'-phosphate
  modified_base 21: mod_base = OTHER; note = 2'-O-methyluridine-3'-phosphate N-[tris(GalNAc-alkyl)-amidodecanoyl)]-4-hydroxyprolinol (Hyp-(GalNAc-alkyl)3)
atgtggtcaagacggatgtgt

SEQ ID NO: 6918 - RNA, 21 nt, synthetic construct
  source 1..21: mol_type = other RNA
  modified_base 1: mod_base = OTHER; note = 2'-O-methyluridine-3'-phosphorothioate
  modified_base 2: mod_base = OTHER; note = 2'-O-methylguanosine-3'-phosphorothioate
  modified_base 3: mod_base = OTHER; note = 2'-O-methyluridine-3'-phosphate
  modified_base 4: mod_base = OTHER; note = 2'-O-methylguanosine-3'-phosphate
  modified_base 5: mod_base = OTHER; note = 2'-O-methylguanosine-3'-phosphate
  modified_base 6: mod_base = OTHER; note = 2'-O-methyluridine-3'-phosphate
  modified_base 7: mod_base = OTHER; note = 2'-O-methylcytidine-3'-phosphate
  modified_base 8: mod_base = OTHER; note = 2'-O-methyladenosine-3'-phosphate
  modified_base 9: mod_base = OTHER; note = 2'-fluoroadenosine-3'-phosphate
  modified_base 10: mod_base = OTHER; note = 2'-fluoroguanosine-3'-phosphate
  modified_base 11: mod_base = OTHER; note = 2'-fluoroadenosine-3'-phosphate
  modified_base 12: mod_base = OTHER; note = 2'-O-methylcytidine-3'-phosphate
  modified_base 13: mod_base = OTHER; note = 2'-O-methylguanosine-3'-phosphate
  modified_base 14: mod_base = OTHER; note = 2'-O-methylguanosine-3'-phosphate
  modified_base 15: mod_base = OTHER; note = 2'-O-methyladenosine-3'-phosphate
  modified_base 16: mod_base = OTHER; note = 2'-O-methyluridine-3'-phosphate
  modified_base 17: mod_base = OTHER; note = 2'-O-methylguanosine-3'-phosphate
  modified_base 18: mod_base = OTHER; note = 2'-O-methyluridine-3'-phosphate
  modified_base 19: mod_base = OTHER; note = 2'-O-methylguanosine-3'-phosphate
  modified_base 20: mod_base = OTHER; note = 2'-O-methylcytidine-3'-phosphate
  modified_base 21: mod_base = OTHER; note = 2'-O-methyluridine-3'-phosphate N-[tris(GalNAc-alkyl)-amidodecanoyl)]-4-hydroxyprolinol (Hyp-(GalNAc-alkyl)3)
tgtggtcaagacggatgtgct

SEQ ID NO: 6919 - RNA, 21 nt, synthetic construct
  source 1..21: mol_type = other RNA
  modified_base 1: mod_base = OTHER; note = 2'-O-methylguanosine-3'-phosphorothioate
  modified_base 2: mod_base = OTHER; note = 2'-O-methyluridine-3'-phosphorothioate
  modified_base 3: mod_base = OTHER; note = 2'-O-methylguanosine-3'-phosphate
  modified_base 4: mod_base = OTHER; note = 2'-O-methylguanosine-3'-phosphate
  modified_base 5: mod_base = OTHER; note = 2'-O-methyluridine-3'-phosphate
  modified_base 6: mod_base = OTHER; note = 2'-O-methylcytidine-3'-phosphate
  modified_base 7: mod_base = OTHER; note = 2'-O-methyladenosine-3'-phosphate
  modified_base 8: mod_base = OTHER; note = 2'-O-methyladenosine-3'-phosphate
  modified_base 9: mod_base = OTHER; note = 2'-fluoroguanosine-3'-phosphate
  modified_base 10: mod_base = OTHER; note = 2'-fluoroadenosine-3'-phosphate
  modified_base 11: mod_base = OTHER; note = 2'-fluorocytidine-3'-phosphate
  modified_base 12: mod_base = OTHER; note = 2'-O-methylguanosine-3'-phosphate
  modified_base 13: mod_base = OTHER; note = 2'-O-methylguanosine-3'-phosphate
  modified_base 14: mod_base = OTHER; note = 2'-O-methyladenosine-3'-phosphate
  modified_base 15: mod_base = OTHER; note = 2'-O-methyluridine-3'-phosphate
  modified_base 16: mod_base = OTHER; note = 2'-O-methylguanosine-3'-phosphate
  modified_base 17: mod_base = OTHER; note = 2'-O-methyluridine-3'-phosphate
  modified_base 18: mod_base = OTHER; note = 2'-O-methylguanosine-3'-phosphate
  modified_base 19: mod_base = OTHER; note = 2'-O-methylcytidine-3'-phosphate
  modified_base 20: mod_base = OTHER; note = 2'-O-methylcytidine-3'-phosphate
  modified_base 21: mod_base = OTHER; note = 2'-O-methyluridine-3'-phosphate N-[tris(GalNAc-alkyl)-amidodecanoyl)]-4-hydroxyprolinol (Hyp-(GalNAc-alkyl)3)
gtggtcaagacggatgtgcct

SEQ ID NO: 6920 - RNA, 21 nt, synthetic construct
  source 1..21: mol_type = other RNA
  modified_base 1: mod_base = OTHER; note = 2'-O-methyluridine-3'-phosphorothioate
  modified_base 2: mod_base = OTHER; note = 2'-O-methylguanosine-3'-phosphorothioate
  modified_base 3: mod_base = OTHER; note = 2'-O-methylguanosine-3'-phosphate
  modified_base 4: mod_base = OTHER; note = 2'-O-methyluridine-3'-phosphate
  modified_base 5: mod_base = OTHER; note = 2'-O-methylcytidine-3'-phosphate
  modified_base 6: mod_base = OTHER; note = 2'-O-methyladenosine-3'-phosphate
  modified_base 7: mod_base = OTHER; note = 2'-O-methyladenosine-3'-phosphate
  modified_base 8: mod_base = OTHER; note = 2'-O-methylguanosine-3'-phosphate
  modified_base 9: mod_base = OTHER; note = 2'-fluoroadenosine-3'-phosphate
  modified_base 10: mod_base = OTHER; note = 2'-fluorocytidine-3'-phosphate
  modified_base 11: mod_base = OTHER; note = 2'-fluoroguanosine-3'-phosphate
  modified_base 12: mod_base = OTHER; note = 2'-O-methylguanosine-3'-phosphate
  modified_base 13: mod_base = OTHER; note = 2'-O-methyladenosine-3'-phosphate
  modified_base 14: mod_base = OTHER; note = 2'-O-methyluridine-3'-phosphate
  modified_base 15: mod_base = OTHER; note = 2'-O-methylguanosine-3'-phosphate
  modified_base 16: mod_base = OTHER; note = 2'-O-methyluridine-3'-phosphate
  modified_base 17: mod_base = OTHER; note = 2'-O-methylguanosine-3'-phosphate
  modified_base 18: mod_base = OTHER; note = 2'-O-methylcytidine-3'-phosphate
  modified_base 19: mod_base = OTHER; note = 2'-O-methylcytidine-3'-phosphate
  modified_base 20: mod_base = OTHER; note = 2'-O-methyladenosine-3'-phosphate
  modified_base 21: mod_base = OTHER; note = 2'-O-methyluridine-3'-phosphate N-[tris(GalNAc-alkyl)-amidodecanoyl)]-4-hydroxyprolinol (Hyp-(GalNAc-alkyl)3)
tggtcaagacggatgtgccat

SEQ ID NO: 6921 - RNA, 21 nt, synthetic construct
  source 1..21: mol_type = other RNA
  modified_base 1: mod_base = OTHER; note = 2'-O-methylguanosine-3'-phosphorothioate
  modified_base 2: mod_base = OTHER; note = 2'-O-methylguanosine-3'-phosphorothioate
  modified_base 3: mod_base = OTHER; note = 2'-O-methyluridine-3'-phosphate
  modified_base 4: mod_base = OTHER; note = 2'-O-methylcytidine-3'-phosphate
  modified_base 5: mod_base = OTHER; note = 2'-O-methyladenosine-3'-phosphate
  modified_base 6: mod_base = OTHER; note = 2'-O-methyladenosine-3'-phosphate
  modified_base 7: mod_base = OTHER; note = 2'-O-methylguanosine-3'-phosphate
  modified_base 8: mod_base = OTHER; note = 2'-O-methyladenosine-3'-phosphate
  modified_base 9: mod_base = OTHER; note = 2'-fluorocytidine-3'-phosphate
  modified_base 10: mod_base = OTHER; note = 2'-fluoroguanosine-3'-phosphate
  modified_base 11: mod_base = OTHER; note = 2'-fluoroguanosine-3'-phosphate
  modified_base 12: mod_base = OTHER; note = 2'-O-methyladenosine-3'-phosphate
  modified_base 13: mod_base = OTHER; note = 2'-O-methyluridine-3'-phosphate
  modified_base 14: mod_base = OTHER; note = 2'-O-methylguanosine-3'-phosphate
  modified_base 15: mod_base = OTHER; note = 2'-O-methyluridine-3'-phosphate
  modified_base 16: mod_base = OTHER; note = 2'-O-methylguanosine-3'-phosphate
  modified_base 17: mod_base = OTHER; note = 2'-O-methylcytidine-3'-phosphate
  modified_base 18: mod_base = OTHER; note = 2'-O-methylcytidine-3'-phosphate
  modified_base 19: mod_base = OTHER; note = 2'-O-methyladenosine-3'-phosphate
  modified_base 20: mod_base = OTHER; note = 2'-O-methylguanosine-3'-phosphate
  modified_base 21: mod_base = OTHER; note = 2'-O-methyluridine-3'-phosphate N-[tris(GalNAc-alkyl)-amidodecanoyl)]-4-hydroxyprolinol (Hyp-(GalNAc-alkyl)3)
ggtcaagacggatgtgccagt

SEQ ID NO: 6922 - RNA, 21 nt, synthetic construct
  source 1..21: mol_type = other RNA
  modified_base 1: mod_base = OTHER; note = 2'-O-methylguanosine-3'-phosphorothioate
  modified_base 2: mod_base = OTHER; note = 2'-O-methyluridine-3'-phosphorothioate
  modified_base 3: mod_base = OTHER; note = 2'-O-methylcytidine-3'-phosphate
  modified_base 4: mod_base = OTHER; note = 2'-O-methyladenosine-3'-phosphate
  modified_base 5: mod_base = OTHER; note = 2'-O-methyladenosine-3'-phosphate
  modified_base 6: mod_base = OTHER; note = 2'-O-methylguanosine-3'-phosphate
  modified_base 7: mod_base = OTHER; note = 2'-O-methyladenosine-3'-phosphate
  modified_base 8: mod_base = OTHER; note = 2'-O-methylcytidine-3'-phosphate
  modified_base 9: mod_base = OTHER; note = 2'-fluoroguanosine-3'-phosphate
  modified_base 10: mod_base = OTHER; note = 2'-fluoroguanosine-3'-phosphate
  modified_base 11: mod_base = OTHER; note = 2'-fluoroadenosine-3'-phosphate
  modified_base 12: mod_base = OTHER; note = 2'-O-methyluridine-3'-phosphate
  modified_base 13: mod_base = OTHER; note = 2'-O-methylguanosine-3'-phosphate
  modified_base 14: mod_base = OTHER; note = 2'-O-methyluridine-3'-phosphate
  modified_base 15: mod_base = OTHER; note = 2'-O-methylguanosine-3'-phosphate
  modified_base 16: mod_base = OTHER; note = 2'-O-methylcytidine-3'-phosphate
  modified_base 17: mod_base = OTHER; note = 2'-O-methylcytidine-3'-phosphate
  modified_base 18: mod_base = OTHER; note = 2'-O-methyladenosine-3'-phosphate
  modified_base 19: mod_base = OTHER; note = 2'-O-methylguanosine-3'-phosphate
  modified_base 20: mod_base = OTHER; note = 2'-O-methyladenosine-3'-phosphate
  modified_base 21: mod_base = OTHER; note = 2'-O-methyluridine-3'-phosphate N-[tris(GalNAc-alkyl)-amidodecanoyl)]-4-hydroxyprolinol (Hyp-(GalNAc-alkyl)3)
gtcaagacggatgtgccagat

SEQ ID NO: 6923 - RNA, 21 nt, synthetic construct
  source 1..21: mol_type = other RNA
  modified_base 1: mod_base = OTHER; note = 2'-O-methyluridine-3'-phosphorothioate
  modified_base 2: mod_base = OTHER; note = 2'-O-methylcytidine-3'-phosphorothioate
  modified_base 3: mod_base = OTHER; note = 2'-O-methyladenosine-3'-phosphate
  modified_base 4: mod_base = OTHER; note = 2'-O-methyladenosine-3'-phosphate
  modified_base 5: mod_base = OTHER; note = 2'-O-methylguanosine-3'-phosphate
  modified_base 6: mod_base = OTHER; note = 2'-O-methyladenosine-3'-phosphate
  modified_base 7: mod_base = OTHER; note = 2'-O-methylcytidine-3'-phosphate
  modified_base 8: mod_base = OTHER; note = 2'-O-methylguanosine-3'-phosphate
  modified_base 9: mod_base = OTHER; note = 2'-fluoroguanosine-3'-phosphate
  modified_base 10: mod_base = OTHER; note = 2'-fluoroadenosine-3'-phosphate
  modified_base 11: mod_base = OTHER; note = 2'-fluorouridine-3'-phosphate
  modified_base 12: mod_base = OTHER; note = 2'-O-methylguanosine-3'-phosphate
  modified_base 13: mod_base = OTHER; note = 2'-O-methyluridine-3'-phosphate
  modified_base 14: mod_base = OTHER; note = 2'-O-methylguanosine-3'-phosphate
  modified_base 15: mod_base = OTHER; note = 2'-O-methylcytidine-3'-phosphate
  modified_base 16: mod_base = OTHER; note = 2'-O-methylcytidine-3'-phosphate
  modified_base 17: mod_base = OTHER; note = 2'-O-methyladenosine-3'-phosphate
  modified_base 18: mod_base = OTHER; note = 2'-O-methylguanosine-3'-phosphate
  modified_base 19: mod_base = OTHER; note = 2'-O-methyladenosine-3'-phosphate
  modified_base 20: mod_base = OTHER; note = 2'-O-methyluridine-3'-phosphate
  modified_base 21: mod_base = OTHER; note = 2'-O-methyluridine-3'-phosphate N-[tris(GalNAc-alkyl)-amidodecanoyl)]-4-hydroxyprolinol (Hyp-(GalNAc-alkyl)3)
tcaagacggatgtgccagatt

SEQ ID NO: 6924 - RNA, 21 nt, synthetic construct
  source 1..21: mol_type = other RNA
  modified_base 1: mod_base = OTHER; note = 2'-O-methylcytidine-3'-phosphorothioate
  modified_base 2: mod_base = OTHER; note = 2'-O-methyladenosine-3'-phosphorothioate
  modified_base 3: mod_base = OTHER; note = 2'-O-methyladenosine-3'-phosphate
  modified_base 4: mod_base = OTHER; note = 2'-O-methylguanosine-3'-phosphate
  modified_base 5: mod_base = OTHER; note = 2'-O-methyladenosine-3'-phosphate
  modified_base 6: mod_base = OTHER; note = 2'-O-methylcytidine-3'-phosphate
  modified_base 7: mod_base = OTHER; note = 2'-O-methylguanosine-3'-phosphate
  modified_base 8: mod_base = OTHER; note = 2'-O-methylguanosine-3'-phosphate
  modified_base 9: mod_base = OTHER; note = 2'-fluoroadenosine-3'-phosphate
  modified_base 10: mod_base = OTHER; note = 2'-fluorouridine-3'-phosphate
  modified_base 11: mod_base = OTHER; note = 2'-fluoroguanosine-3'-phosphate
  modified_base 12: mod_base = OTHER; note = 2'-O-methyluridine-3'-phosphate
  modified_base 13: mod_base = OTHER; note = 2'-O-methylguanosine-3'-phosphate
  modified_base 14: mod_base = OTHER; note = 2'-O-methylcytidine-3'-phosphate
  modified_base 15: mod_base = OTHER; note = 2'-O-methylcytidine-3'-phosphate
  modified_base 16: mod_base = OTHER; note = 2'-O-methyladenosine-3'-phosphate
  modified_base 17: mod_base = OTHER; note = 2'-O-methylguanosine-3'-phosphate
  modified_base 18: mod_base = OTHER; note = 2'-O-methyladenosine-3'-phosphate
  modified_base 19: mod_base = OTHER; note = 2'-O-methyluridine-3'-phosphate
  modified_base 20: mod_base = OTHER; note = 2'-O-methyladenosine-3'-phosphate
  modified_base 21: mod_base = OTHER; note = 2'-O-methyluridine-3'-phosphate N-[tris(GalNAc-alkyl)-amidodecanoyl)]-4-hydroxyprolinol (Hyp-(GalNAc-alkyl)3)
caagacggatgtgccagatat

SEQ ID NO: 6925 - RNA, 21 nt, synthetic construct
  source 1..21: mol_type = other RNA
  modified_base 1: mod_base = OTHER; note = 2'-O-methyladenosine-3'-phosphorothioate
  modified_base 2: mod_base = OTHER; note = 2'-O-methyladenosine-3'-phosphorothioate
  modified_base 3: mod_base = OTHER; note = 2'-O-methylguanosine-3'-phosphate
  modified_base 4: mod_base = OTHER; note = 2'-O-methyladenosine-3'-phosphate
  modified_base 5: mod_base = OTHER; note = 2'-O-methylcytidine-3'-phosphate
  modified_base 6: mod_base = OTHER; note = 2'-O-methylguanosine-3'-phosphate
  modified_base 7: mod_base = OTHER; note = 2'-O-methylguanosine-3'-phosphate
  modified_base 8: mod_base = OTHER; note = 2'-O-methyladenosine-3'-phosphate
  modified_base 9: mod_base = OTHER; note = 2'-fluorouridine-3'-phosphate
  modified_base 10: mod_base = OTHER; note = 2'-fluoroguanosine-3'-phosphate
  modified_base 11: mod_base = OTHER; note = 2'-fluorouridine-3'-phosphate
  modified_base 12: mod_base = OTHER; note = 2'-O-methylguanosine-3'-phosphate
  modified_base 13: mod_base = OTHER; note = 2'-O-methylcytidine-3'-phosphate
  modified_base 14: mod_base = OTHER; note = 2'-O-methylcytidine-3'-phosphate
  modified_base 15: mod_base = OTHER; note = 2'-O-methyladenosine-3'-phosphate
  modified_base 16: mod_base = OTHER; note = 2'-O-methylguanosine-3'-phosphate
  modified_base 17: mod_base = OTHER; note = 2'-O-methyladenosine-3'-phosphate
  modified_base 18: mod_base = OTHER; note = 2'-O-methyluridine-3'-phosphate
  modified_base 19: mod_base = OTHER; note = 2'-O-methyladenosine-3'-phosphate
  modified_base 20: mod_base = OTHER; note = 2'-O-methyluridine-3'-phosphate
  modified_base 21: mod_base = OTHER; note = 2'-O-methyluridine-3'-phosphate N-[tris(GalNAc-alkyl)-amidodecanoyl)]-4-hydroxyprolinol (Hyp-(GalNAc-alkyl)3)
aagacggatgtgccagatatt

SEQ ID NO: 6926 - RNA, 21 nt, synthetic construct
  source 1..21: mol_type = other RNA
  modified_base 1: mod_base = OTHER; note = 2'-O-methyladenosine-3'-phosphorothioate
  modified_base 2: mod_base = OTHER; note = 2'-O-methylguanosine-3'-phosphorothioate
  modified_base 3: mod_base = OTHER; note = 2'-O-methyladenosine-3'-phosphate
  modified_base 4: mod_base = OTHER; note = 2'-O-methylcytidine-3'-phosphate
  modified_base 5: mod_base = OTHER; note = 2'-O-methylguanosine-3'-phosphate
  modified_base 6: mod_base = OTHER; note = 2'-O-methylguanosine-3'-phosphate
  modified_base 7: mod_base = OTHER; note = 2'-O-methyladenosine-3'-phosphate
  modified_base 8: mod_base = OTHER; note = 2'-O-methyluridine-3'-phosphate
  modified_base 9: mod_base = OTHER; note = 2'-fluoroguanosine-3'-phosphate
  modified_base 10: mod_base = OTHER; note = 2'-fluorouridine-3'-phosphate
  modified_base 11: mod_base = OTHER; note = 2'-fluoroguanosine-3'-phosphate
  modified_base 12: mod_base = OTHER; note = 2'-O-methylcytidine-3'-phosphate
  modified_base 13: mod_base = OTHER; note = 2'-O-methylcytidine-3'-phosphate
  modified_base 14: mod_base = OTHER; note = 2'-O-methyladenosine-3'-phosphate
  modified_base 15: mod_base = OTHER; note = 2'-O-methylguanosine-3'-phosphate
  modified_base 16: mod_base = OTHER; note = 2'-O-methyladenosine-3'-phosphate
  modified_base 17: mod_base = OTHER; note = 2'-O-methyluridine-3'-phosphate
  modified_base 18: mod_base = OTHER; note = 2'-O-methyladenosine-3'-phosphate
  modified_base 19: mod_base = OTHER; note = 2'-O-methyluridine-3'-phosphate
  modified_base 20: mod_base = OTHER; note = 2'-O-methylguanosine-3'-phosphate
  modified_base 21: mod_base = OTHER; note = 2'-O-methyluridine-3'-phosphate N-[tris(GalNAc-alkyl)-amidodecanoyl)]-4-hydroxyprolinol (Hyp-(GalNAc-alkyl)3)
agacggatgtgccagatatgt

SEQ ID NO: 6927 - RNA, 21 nt, synthetic construct
  source 1..21: mol_type = other RNA
  modified_base 1: mod_base = OTHER; note = 2'-O-methylguanosine-3'-phosphorothioate
  modified_base 2: mod_base = OTHER; note = 2'-O-methyladenosine-3'-phosphorothioate
  modified_base 3: mod_base = OTHER; note = 2'-O-methylcytidine-3'-phosphate
  modified_base 4: mod_base = OTHER; note = 2'-O-methylguanosine-3'-phosphate
  modified_base 5: mod_base = OTHER; note = 2'-O-methylguanosine-3'-phosphate
  modified_base 6: mod_base = OTHER; note = 2'-O-methyladenosine-3'-phosphate
  modified_base 7: mod_base = OTHER; note = 2'-O-methyluridine-3'-phosphate
  modified_base 8: mod_base = OTHER; note = 2'-O-methylguanosine-3'-phosphate
  modified_base 9: mod_base = OTHER; note = 2'-fluorouridine-3'-phosphate
  modified_base 10: mod_base = OTHER; note = 2'-fluoroguanosine-3'-phosphate
  modified_base 11: mod_base = OTHER; note = 2'-fluorocytidine-3'-phosphate
  modified_base 12: mod_base = OTHER; note = 2'-O-methylcytidine-3'-phosphate
  modified_base 13: mod_base = OTHER; note = 2'-O-methyladenosine-3'-phosphate
  modified_base 14: mod_base = OTHER; note = 2'-O-methylguanosine-3'-phosphate
  modified_base 15: mod_base = OTHER; note = 2'-O-methyladenosine-3'-phosphate
  modified_base 16: mod_base = OTHER; note = 2'-O-methyluridine-3'-phosphate
  modified_base 17: mod_base = OTHER; note = 2'-O-methyladenosine-3'-phosphate
  modified_base 18: mod_base = OTHER; note = 2'-O-methyluridine-3'-phosphate
  modified_base 19: mod_base = OTHER; note = 2'-O-methylguanosine-3'-phosphate
  modified_base 20: mod_base = OTHER; note = 2'-O-methylguanosine-3'-phosphate
  modified_base 21: mod_base = OTHER; note = 2'-O-methyluridine-3'-phosphate N-[tris(GalNAc-alkyl)-amidodecanoyl)]-4-hydroxyprolinol (Hyp-(GalNAc-alkyl)3)
gacggatgtgccagatatggt

SEQ ID NO: 6928 - RNA, 21 nt, synthetic construct
  source 1..21: mol_type = other RNA
  modified_base 1: mod_base = OTHER; note = 2'-O-methyladenosine-3'-phosphorothioate
  modified_base 2: mod_base = OTHER; note = 2'-O-methylcytidine-3'-phosphorothioate
  modified_base 3: mod_base = OTHER; note = 2'-O-methylguanosine-3'-phosphate
  modified_base 4: mod_base = OTHER; note = 2'-O-methylguanosine-3'-phosphate
  modified_base 5: mod_base = OTHER; note = 2'-O-methyladenosine-3'-phosphate
  modified_base 6: mod_base = OTHER; note = 2'-O-methyluridine-3'-phosphate
  modified_base 7: mod_base = OTHER; note = 2'-O-methylguanosine-3'-phosphate
  modified_base 8: mod_base = OTHER; note = 2'-O-methyluridine-3'-phosphate
  modified_base 9: mod_base = OTHER; note = 2'-fluoroguanosine-3'-phosphate
  modified_base 10: mod_base = OTHER; note = 2'-fluorocytidine-3'-phosphate
  modified_base 11: mod_base = OTHER; note = 2'-fluorocytidine-3'-phosphate
  modified_base 12: mod_base = OTHER; note = 2'-O-methyladenosine-3'-phosphate
  modified_base 13: mod_base = OTHER; note = 2'-O-methylguanosine-3'-phosphate
  modified_base 14: mod_base = OTHER; note = 2'-O-methyladenosine-3'-phosphate
  modified_base 15: mod_base = OTHER; note = 2'-O-methyluridine-3'-phosphate
  modified_base 16: mod_base = OTHER; note = 2'-O-methyladenosine-3'-phosphate
  modified_base 17: mod_base = OTHER; note = 2'-O-methyluridine-3'-phosphate
  modified_base 18: mod_base = OTHER; note = 2'-O-methylguanosine-3'-phosphate
  modified_base 19: mod_base = OTHER; note = 2'-O-methylguanosine-3'-phosphate
  modified_base 20: mod_base = OTHER; note = 2'-O-methyluridine-3'-phosphate
  modified_base 21: mod_base = OTHER; note = 2'-O-methyluridine-3'-phosphate N-[tris(GalNAc-alkyl)-amidodecanoyl)]-4-hydroxyprolinol (Hyp-(GalNAc-alkyl)3)
acggatgtgccagatatggtt

SEQ ID NO: 6929 - RNA, 21 nt, synthetic construct
  source 1..21: mol_type = other RNA
  modified_base 1: mod_base = OTHER; note = 2'-O-methylcytidine-3'-phosphorothioate
  modified_base 2: mod_base = OTHER; note = 2'-O-methylguanosine-3'-phosphorothioate
  modified_base 3: mod_base = OTHER; note = 2'-O-methylguanosine-3'-phosphate
  modified_base 4: mod_base = OTHER; note = 2'-O-methyladenosine-3'-phosphate
  modified_base 5: mod_base = OTHER; note = 2'-O-methyluridine-3'-phosphate
  modified_base 6: mod_base = OTHER; note = 2'-O-methylguanosine-3'-phosphate
  modified_base 7: mod_base = OTHER; note = 2'-O-methyluridine-3'-phosphate
  modified_base 8: mod_base = OTHER; note = 2'-O-methylguanosine-3'-phosphate
  modified_base 9: mod_base = OTHER; note = 2'-fluorocytidine-3'-phosphate
  modified_base 10: mod_base = OTHER; note = 2'-fluorocytidine-3'-phosphate
  modified_base 11: mod_base = OTHER; note = 2'-fluoroadenosine-3'-phosphate
  modified_base 12: mod_base = OTHER; note = 2'-O-methylguanosine-3'-phosphate
  modified_base 13: mod_base = OTHER; note = 2'-O-methyladenosine-3'-phosphate
  modified_base 14: mod_base = OTHER; note = 2'-O-methyluridine-3'-phosphate
  modified_base 15: mod_base = OTHER; note = 2'-O-methyladenosine-3'-phosphate
  modified_base 16: mod_base = OTHER; note = 2'-O-methyluridine-3'-phosphate
  modified_base 17: mod_base = OTHER; note = 2'-O-methylguanosine-3'-phosphate
  modified_base 18: mod_base = OTHER; note = 2'-O-methylguanosine-3'-phosphate
  modified_base 19: mod_base = OTHER; note = 2'-O-methyluridine-3'-phosphate
  modified_base 20: mod_base = OTHER; note = 2'-O-methylguanosine-3'-phosphate
  modified_base 21: mod_base = OTHER; note = 2'-O-methyluridine-3'-phosphate N-[tris(GalNAc-alkyl)-amidodecanoyl)]-4-hydroxyprolinol (Hyp-(GalNAc-alkyl)3)
cggatgtgccagatatggtgt

SEQ ID NO: 6930 - RNA, 21 nt, synthetic construct
  source 1..21: mol_type = other RNA
  modified_base 1: mod_base = OTHER; note = 2'-O-methylguanosine-3'-phosphorothioate
  modified_base 2: mod_base = OTHER; note = 2'-O-methyladenosine-3'-phosphorothioate
  modified_base 3: mod_base = OTHER; note = 2'-O-methyluridine-3'-phosphate
  modified_base 4: mod_base = OTHER; note = 2'-O-methylguanosine-3'-phosphate
  modified_base 5: mod_base = OTHER; note = 2'-O-methyluridine-3'-phosphate
  modified_base 6: mod_base = OTHER; note = 2'-O-methylguanosine-3'-phosphate
  modified_base 7: mod_base = OTHER; note = 2'-O-methylcytidine-3'-phosphate
  modified_base 8: mod_base = OTHER; note = 2'-O-methylcytidine-3'-phosphate
  modified_base 9: mod_base = OTHER; note = 2'-fluoroadenosine-3'-phosphate
  modified_base 10: mod_base = OTHER; note = 2'-fluoroguanosine-3'-phosphate
  modified_base 11: mod_base = OTHER; note = 2'-fluoroadenosine-3'-phosphate
  modified_base 12: mod_base = OTHER; note = 2'-O-methyluridine-3'-phosphate
  modified_base 13: mod_base = OTHER; note = 2'-O-methyladenosine-3'-phosphate
  modified_base 14: mod_base = OTHER; note = 2'-O-methyluridine-3'-phosphate
  modified_base 15: mod_base = OTHER; note = 2'-O-methylguanosine-3'-phosphate
  modified_base 16: mod_base = OTHER; note = 2'-O-methylguanosine-3'-phosphate
  modified_base 17: mod_base = OTHER; note = 2'-O-methyluridine-3'-phosphate
  modified_base 18: mod_base = OTHER; note = 2'-O-methylguanosine-3'-phosphate
  modified_base 19: mod_base = OTHER; note = 2'-O-methylguanosine-3'-phosphate
  modified_base 20: mod_base = OTHER; note = 2'-O-methyluridine-3'-phosphate
  modified_base 21: mod_base = OTHER; note = 2'-O-methyluridine-3'-phosphate N-[tris(GalNAc-alkyl)-amidodecanoyl)]-4-hydroxyprolinol (Hyp-(GalNAc-alkyl)3)
gatgtgccagatatggtggtt

SEQ ID NO: 6931 - RNA, 21 nt, synthetic construct
  source 1..21: mol_type = other RNA
  modified_base 1: mod_base = OTHER; note = 2'-O-methyladenosine-3'-phosphorothioate
  modified_base 2: mod_base = OTHER; note = 2'-O-methyluridine-3'-phosphorothioate
  modified_base 3: mod_base = OTHER; note = 2'-O-methylguanosine-3'-phosphate
  modified_base 4: mod_base = OTHER; note = 2'-O-methyluridine-3'-phosphate
  modified_base 5: mod_base = OTHER; note = 2'-O-methylguanosine-3'-phosphate
  modified_base 6: mod_base = OTHER; note = 2'-O-methylcytidine-3'-phosphate
  modified_base 7: mod_base = OTHER; note = 2'-O-methylcytidine-3'-phosphate
  modified_base 8: mod_base = OTHER; note = 2'-O-methyladenosine-3'-phosphate
  modified_base 9: mod_base = OTHER; note = 2'-fluoroguanosine-3'-phosphate
  modified_base 10: mod_base = OTHER; note = 2'-fluoroadenosine-3'-phosphate
  modified_base 11: mod_base = OTHER; note = 2'-fluorouridine-3'-phosphate
  modified_base 12: mod_base = OTHER; note = 2'-O-methyladenosine-3'-phosphate
  modified_base 13: mod_base = OTHER; note = 2'-O-methyluridine-3'-phosphate
  modified_base 14: mod_base = OTHER; note = 2'-O-methylguanosine-3'-phosphate
  modified_base 15: mod_base = OTHER; note = 2'-O-methylguanosine-3'-phosphate
  modified_base 16: mod_base = OTHER; note = 2'-O-methyluridine-3'-phosphate
  modified_base 17: mod_base = OTHER; note = 2'-O-methylguanosine-3'-phosphate
  modified_base 18: mod_base = OTHER; note = 2'-O-methylguanosine-3'-phosphate
  modified_base 19: mod_base = OTHER; note = 2'-O-methyluridine-3'-phosphate
  modified_base 20: mod_base = OTHER; note = 2'-O-methylguanosine-3'-phosphate
  modified_base 21: mod_base = OTHER; note = 2'-O-methyluridine-3'-phosphate N-[tris(GalNAc-alkyl)-amidodecanoyl)]-4-hydroxyprolinol (Hyp-(GalNAc-alkyl)3)
atgtgccagatatggtggtgt

SEQ ID NO: 6932 - RNA, 21 nt, synthetic construct
  source 1..21: mol_type = other RNA
  modified_base 1: mod_base = OTHER; note = 2'-O-methyluridine-3'-phosphorothioate
  modified_base 2: mod_base = OTHER; note = 2'-O-methylguanosine-3'-phosphorothioate
  modified_base 3: mod_base = OTHER; note = 2'-O-methyluridine-3'-phosphate
  modified_base 4: mod_base = OTHER; note = 2'-O-methylguanosine-3'-phosphate
  modified_base 5: mod_base = OTHER; note = 2'-O-methylcytidine-3'-phosphate
  modified_base 6: mod_base = OTHER; note = 2'-O-methylcytidine-3'-phosphate
  modified_base 7: mod_base = OTHER; note = 2'-O-methyladenosine-3'-phosphate
  modified_base 8: mod_base = OTHER; note = 2'-O-methylguanosine-3'-phosphate
  modified_base 9: mod_base = OTHER; note = 2'-fluoroadenosine-3'-phosphate
  modified_base 10: mod_base = OTHER; note = 2'-fluorouridine-3'-phosphate
  modified_base 11: mod_base = OTHER; note = 2'-fluoroadenosine-3'-phosphate
  modified_base 12: mod_base = OTHER; note = 2'-O-methyluridine-3'-phosphate
  modified_base 13: mod_base = OTHER; note = 2'-O-methylguanosine-3'-phosphate
  modified_base 14: mod_base = OTHER; note = 2'-O-methylguanosine-3'-phosphate
  modified_base 15: mod_base = OTHER; note = 2'-O-methyluridine-3'-phosphate
  modified_base 16: mod_base = OTHER; note = 2'-O-methylguanosine-3'-phosphate
  modified_base 17: mod_base = OTHER; note = 2'-O-methylguanosine-3'-phosphate
  modified_base 18: mod_base = OTHER; note = 2'-O-methyluridine-3'-phosphate
  modified_base 19: mod_base = OTHER; note = 2'-O-methylguanosine-3'-phosphate
  modified_base 20: mod_base = OTHER; note = 2'-O-methylguanosine-3'-phosphate
  modified_base 21: mod_base = OTHER; note = 2'-O-methyluridine-3'-phosphate N-[tris(GalNAc-alkyl)-amidodecanoyl)]-4-hydroxyprolinol (Hyp-(GalNAc-alkyl)3)
tgtgccagatatggtggtggt

SEQ ID NO: 6933 - RNA, 21 nt, synthetic construct
  source 1..21: mol_type = other RNA
  modified_base 1: mod_base = OTHER; note = 2'-O-methylguanosine-3'-phosphorothioate
  modified_base 2: mod_base = OTHER; note = 2'-O-methyluridine-3'-phosphorothioate
  modified_base 3: mod_base = OTHER; note = 2'-O-methylguanosine-3'-phosphate
  modified_base 4: mod_base = OTHER; note = 2'-O-methylcytidine-3'-phosphate
  modified_base 5: mod_base = OTHER; note = 2'-O-methylcytidine-3'-phosphate
  modified_base 6: mod_base = OTHER; note = 2'-O-methyladenosine-3'-phosphate
  modified_base 7: mod_base = OTHER; note = 2'-O-methylguanosine-3'-phosphate
  modified_base 8: mod_base = OTHER; note = 2'-O-methyladenosine-3'-phosphate
  modified_base 9: mod_base = OTHER; note = 2'-fluorouridine-3'-phosphate
  modified_base 10: mod_base = OTHER; note = 2'-fluoroadenosine-3'-phosphate
  modified_base 11: mod_base = OTHER; note = 2'-fluorouridine-3'-phosphate
  modified_base 12: mod_base = OTHER; note = 2'-O-methylguanosine-3'-phosphate
  modified_base 13: mod_base = OTHER; note = 2'-O-methylguanosine-3'-phosphate
  modified_base 14: mod_base = OTHER; note = 2'-O-methyluridine-3'-phosphate
  modified_base 15: mod_base = OTHER; note = 2'-O-methylguanosine-3'-phosphate
  modified_base 16: mod_base = OTHER; note = 2'-O-methylguanosine-3'-phosphate
  modified_base 17: mod_base = OTHER; note = 2'-O-methyluridine-3'-phosphate
  modified_base 18: mod_base = OTHER; note = 2'-O-methylguanosine-3'-phosphate
  modified_base 19: mod_base = OTHER; note = 2'-O-methylguanosine-3'-phosphate
  modified_base 20: mod_base = OTHER; note = 2'-O-methyladenosine-3'-phosphate
  modified_base 21: mod_base = OTHER; note = 2'-O-methyluridine-3'-phosphate N-[tris(GalNAc-alkyl)-amidodecanoyl)]-4-hydroxyprolinol (Hyp-(GalNAc-alkyl)3)
gtgccagatatggtggtggat

SEQ ID NO: 6934 - RNA, 21 nt, synthetic construct
  source 1..21: mol_type = other RNA
  modified_base 1: mod_base = OTHER; note = 2'-O-methyluridine-3'-phosphorothioate
  modified_base 2: mod_base = OTHER; note = 2'-O-methylguanosine-3'-phosphorothioate
  modified_base 3: mod_base = OTHER; note = 2'-O-methylcytidine-3'-phosphate
  modified_base 4: mod_base = OTHER; note = 2'-O-methylcytidine-3'-phosphate
  modified_base 5: mod_base = OTHER; note = 2'-O-methyladenosine-3'-phosphate
  modified_base 6: mod_base = OTHER; note = 2'-O-methylguanosine-3'-phosphate
  modified_base 7: mod_base = OTHER; note = 2'-O-methyladenosine-3'-phosphate
  modified_base 8: mod_base = OTHER; note = 2'-O-methyluridine-3'-phosphate
  modified_base 9: mod_base = OTHER; note = 2'-fluoroadenosine-3'-phosphate
  modified_base 10: mod_base = OTHER; note = 2'-fluorouridine-3'-phosphate
  modified_base 11: mod_base = OTHER; note = 2'-fluoroguanosine-3'-phosphate
  modified_base 12: mod_base = OTHER; note = 2'-O-methylguanosine-3'-phosphate
  modified_base 13: mod_base = OTHER; note = 2'-O-methyluridine-3'-phosphate
  modified_base 14: mod_base = OTHER; note = 2'-O-methylguanosine-3'-phosphate
  modified_base 15: mod_base = OTHER; note = 2'-O-methylguanosine-3'-phosphate
  modified_base 16: mod_base = OTHER; note = 2'-O-methyluridine-3'-phosphate
  modified_base 17: mod_base = OTHER; note = 2'-O-methylguanosine-3'-phosphate
  modified_base 18: mod_base = OTHER; note = 2'-O-methylguanosine-3'-phosphate
  modified_base 19: mod_base = OTHER; note = 2'-O-methyladenosine-3'-phosphate
  modified_base 20: mod_base = OTHER; note = 2'-O-methylguanosine-3'-phosphate
  modified_base 21: mod_base = OTHER; note = 2'-O-methyluridine-3'-phosphate N-[tris(GalNAc-alkyl)-amidodecanoyl)]-4-hydroxyprolinol (Hyp-(GalNAc-alkyl)3)
tgccagatatggtggtggagt

SEQ ID NO: 6935 - RNA, 21 nt, synthetic construct
  source 1..21: mol_type = other RNA
  modified_base 1: mod_base = OTHER; note = 2'-O-methylcytidine-3'-phosphorothioate
  modified_base 2: mod_base = OTHER; note = 2'-O-methylcytidine-3'-phosphorothioate
  modified_base 3: mod_base = OTHER; note = 2'-O-methyladenosine-3'-phosphate
  modified_base 4: mod_base = OTHER; note = 2'-O-methylguanosine-3'-phosphate
  modified_base 5: mod_base = OTHER; note = 2'-O-methyladenosine-3'-phosphate
  modified_base 6: mod_base = OTHER; note = 2'-O-methyluridine-3'-phosphate
  modified_base 7: mod_base = OTHER; note = 2'-O-methyladenosine-3'-phosphate
  modified_base 8: mod_base = OTHER; note = 2'-O-methyluridine-3'-phosphate
  modified_base 9: mod_base = OTHER; note = 2'-fluoroguanosine-3'-phosphate
  modified_base 10: mod_base = OTHER; note = 2'-fluoroguanosine-3'-phosphate
  modified_base 11: mod_base = OTHER; note = 2'-fluorouridine-3'-phosphate
  modified_base 12: mod_base = OTHER; note = 2'-O-methylguanosine-3'-phosphate
  modified_base 13: mod_base = OTHER; note = 2'-O-methylguanosine-3'-phosphate
  modified_base 14: mod_base = OTHER; note = 2'-O-methyluridine-3'-phosphate
  modified_base 15: mod_base = OTHER; note = 2'-O-methylguanosine-3'-phosphate
  modified_base 16: mod_base = OTHER; note = 2'-O-methylguanosine-3'-phosphate
  modified_base 17: mod_base = OTHER; note = 2'-O-methyladenosine-3'-phosphate
  modified_base 18: mod_base = OTHER; note = 2'-O-methylguanosine-3'-phosphate
  modified_base 19: mod_base = OTHER; note = 2'-O-methylguanosine-3'-phosphate
  modified_base 20: mod_base = OTHER; note = 2'-O-methylcytidine-3'-phosphate
  modified_base 21: mod_base = OTHER; note = 2'-O-methyluridine-3'-phosphate N-[tris(GalNAc-alkyl)-amidodecanoyl)]-4-hydroxyprolinol (Hyp-(GalNAc-alkyl)3)
ccagatatggtggtggaggct

SEQ ID NO: 6936 - RNA, 21 nt, synthetic construct
  source 1..21: mol_type = other RNA
  modified_base 1: mod_base = OTHER; note = 2'-O-methyluridine-3'-phosphorothioate
  modified_base 2: mod_base = OTHER; note = 2'-O-methylguanosine-3'-phosphorothioate
  modified_base 3: mod_base = OTHER; note = 2'-O-methylguanosine-3'-phosphate
  modified_base 4: mod_base = OTHER; note = 2'-O-methyluridine-3'-phosphate
  modified_base 5: mod_base = OTHER; note = 2'-O-methylguanosine-3'-phosphate
  modified_base 6: mod_base = OTHER; note = 2'-O-methylguanosine-3'-phosphate
  modified_base 7: mod_base = OTHER; note = 2'-O-methyluridine-3'-phosphate
  modified_base 8: mod_base = OTHER; note = 2'-O-methylguanosine-3'-phosphate
  modified_base 9: mod_base = OTHER; note = 2'-fluoroguanosine-3'-phosphate
  modified_base 10: mod_base = OTHER; note = 2'-fluoroadenosine-3'-phosphate
  modified_base 11: mod_base = OTHER; note = 2'-fluoroguanosine-3'-phosphate
  modified_base 12: mod_base = OTHER; note = 2'-O-methylguanosine-3'-phosphate
  modified_base 13: mod_base = OTHER; note = 2'-O-methylcytidine-3'-phosphate
  modified_base 14: mod_base = OTHER; note = 2'-O-methylcytidine-3'-phosphate
  modified_base 15: mod_base = OTHER; note = 2'-O-methyluridine-3'-phosphate
  modified_base 16: mod_base = OTHER; note = 2'-O-methylguanosine-3'-phosphate
  modified_base 17: mod_base = OTHER; note = 2'-O-methyluridine-3'-phosphate
  modified_base 18: mod_base = OTHER; note = 2'-O-methylguanosine-3'-phosphate
  modified_base 19: mod_base = OTHER; note = 2'-O-methylguanosine-3'-phosphate
  modified_base 20: mod_base = OTHER; note = 2'-O-methylcytidine-3'-phosphate
  modified_base 21: mod_base = OTHER; note = 2'-O-methyluridine-3'-phosphate N-[tris(GalNAc-alkyl)-amidodecanoyl)]-4-hydroxyprolinol (Hyp-(GalNAc-alkyl)3)
tggtggtggaggcctgtggct

SEQ ID NO: 6937 - RNA, 21 nt, synthetic construct
  source 1..21: mol_type = other RNA
  modified_base 1: mod_base = OTHER; note = 2'-O-methylguanosine-3'-phosphorothioate
  modified_base 2: mod_base = OTHER; note = 2'-O-methylguanosine-3'-phosphorothioate
  modified_base 3: mod_base = OTHER; note = 2'-O-methyluridine-3'-phosphate
  modified_base 4: mod_base = OTHER; note = 2'-O-methylguanosine-3'-phosphate
  modified_base 5: mod_base = OTHER; note = 2'-O-methylguanosine-3'-phosphate
  modified_base 6: mod_base = OTHER; note = 2'-O-methyluridine-3'-phosphate
  modified_base 7: mod_base = OTHER; note = 2'-O-methylguanosine-3'-phosphate
  modified_base 8: mod_base = OTHER; note = 2'-O-methylguanosine-3'-phosphate
  modified_base 9: mod_base = OTHER; note = 2'-fluoroadenosine-3'-phosphate
  modified_base 10: mod_base = OTHER; note = 2'-fluoroguanosine-3'-phosphate
  modified_base 11: mod_base = OTHER; note = 2'-fluoroguanosine-3'-phosphate
  modified_base 12: mod_base = OTHER; note = 2'-O-methylcytidine-3'-phosphate
  modified_base 13: mod_base = OTHER; note = 2'-O-methylcytidine-3'-phosphate
  modified_base 14: mod_base = OTHER; note = 2'-O-methyluridine-3'-phosphate
  modified_base 15: mod_base = OTHER; note = 2'-O-methylguanosine-3'-phosphate
  modified_base 16: mod_base = OTHER; note = 2'-O-methyluridine-3'-phosphate
  modified_base 17: mod_base = OTHER; note = 2'-O-methylguanosine-3'-phosphate
  modified_base 18: mod_base = OTHER; note = 2'-O-methylguanosine-3'-phosphate
  modified_base 19: mod_base = OTHER; note = 2'-O-methylcytidine-3'-phosphate
  modified_base 20: mod_base = OTHER; note = 2'-O-methyluridine-3'-phosphate
  modified_base 21: mod_base = OTHER; note = 2'-O-methyluridine-3'-phosphate N-[tris(GalNAc-alkyl)-amidodecanoyl)]-4-hydroxyprolinol (Hyp-(GalNAc-alkyl)3)
ggtggtggaggcctgtggctt

SEQ ID NO: 6938 - RNA, 21 nt, synthetic construct
  source 1..21: mol_type = other RNA
  modified_base 1: mod_base = OTHER; note = 2'-O-methylguanosine-3'-phosphorothioate
  modified_base 2: mod_base = OTHER; note = 2'-O-methyladenosine-3'-phosphorothioate
  modified_base 3: mod_base = OTHER; note = 2'-O-methylguanosine-3'-phosphate
  modified_base 4: mod_base = OTHER; note = 2'-O-methylguanosine-3'-phosphate
  modified_base 5: mod_base = OTHER; note = 2'-O-methylcytidine-3'-phosphate
  modified_base 6: mod_base = OTHER; note = 2'-O-methylcytidine-3'-phosphate
  modified_base 7: mod_base = OTHER; note = 2'-O-methyluridine-3'-phosphate
  modified_base 8: mod_base = OTHER; note = 2'-O-methylguanosine-3'-phosphate
  modified_base 9: mod_base = OTHER; note = 2'-fluorouridine-3'-phosphate
  modified_base 10: mod_base = OTHER; note = 2'-fluoroguanosine-3'-phosphate
  modified_base 11: mod_base = OTHER; note = 2'-fluoroguanosine-3'-phosphate
  modified_base 12: mod_base = OTHER; note = 2'-O-methylcytidine-3'-phosphate
  modified_base 13: mod_base = OTHER; note = 2'-O-methyluridine-3'-phosphate
  modified_base 14: mod_base = OTHER; note = 2'-O-methylguanosine-3'-phosphate
  modified_base 15: mod_base = OTHER; note = 2'-O-methylcytidine-3'-phosphate
  modified_base 16: mod_base = OTHER; note = 2'-O-methyladenosine-3'-phosphate
  modified_base 17: mod_base = OTHER; note = 2'-O-methylguanosine-3'-phosphate
  modified_base 18: mod_base = OTHER; note = 2'-O-methylcytidine-3'-phosphate
  modified_base 19: mod_base = OTHER; note = 2'-O-methyluridine-3'-phosphate
  modified_base 20: mod_base = OTHER; note = 2'-O-methyladenosine-3'-phosphate
  modified_base 21: mod_base = OTHER; note = 2'-O-methyluridine-3'-phosphate N-[tris(GalNAc-alkyl)-amidodecanoyl)]-4-hydroxyprolinol (Hyp-(GalNAc-alkyl)3)
gaggcctgtggctgcagctat

SEQ ID NO: 6939 - RNA, 21 nt, synthetic construct
  source 1..21: mol_type = other RNA
  modified_base 1: mod_base = OTHER; note = 2'-O-methylguanosine-3'-phosphorothioate
  modified_base 2: mod_base = OTHER; note = 2'-O-methylcytidine-3'-phosphorothioate
  modified_base 3: mod_base = OTHER; note = 2'-O-methylcytidine-3'-phosphate
  modified_base 4: mod_base = OTHER; note = 2'-O-methyluridine-3'-phosphate
  modified_base 5: mod_base = OTHER; note = 2'-O-methylguanosine-3'-phosphate
  modified_base 6: mod_base = OTHER; note = 2'-O-methyluridine-3'-phosphate
  modified_base 7: mod_base = OTHER; note = 2'-O-methylguanosine-3'-phosphate
  modified_base 8: mod_base = OTHER; note = 2'-O-methylguanosine-3'-phosphate
  modified_base 9: mod_base = OTHER; note = 2'-fluorocytidine-3'-phosphate
  modified_base 10: mod_base = OTHER; note = 2'-fluorouridine-3'-phosphate
  modified_base 11: mod_base = OTHER; note = 2'-fluoroguanosine-3'-phosphate
  modified_base 12: mod_base = OTHER; note = 2'-O-methylcytidine-3'-phosphate
  modified_base 13: mod_base = OTHER; note = 2'-O-methyladenosine-3'-phosphate
  modified_base 14: mod_base = OTHER; note = 2'-O-methylguanosine-3'-phosphate
  modified_base 15: mod_base = OTHER; note = 2'-O-methylcytidine-3'-phosphate
  modified_base 16: mod_base = OTHER; note = 2'-O-methyluridine-3'-phosphate
  modified_base 17: mod_base = OTHER; note = 2'-O-methyladenosine-3'-phosphate
  modified_base 18: mod_base = OTHER; note = 2'-O-methylguanosine-3'-phosphate
  modified_base 19: mod_base = OTHER; note = 2'-O-methylcytidine-3'-phosphate
  modified_base 20: mod_base = OTHER; note = 2'-O-methyladenosine-3'-phosphate
  modified_base 21: mod_base = OTHER; note = 2'-O-methyluridine-3'-phosphate N-[tris(GalNAc-alkyl)-amidodecanoyl)]-4-hydroxyprolinol (Hyp-(GalNAc-alkyl)3)
gcctgtggctgcagctagcat

SEQ ID NO: 6940 - RNA, 21 nt, synthetic construct
  source 1..21: mol_type = other RNA
  modified_base 1: mod_base = OTHER; note = 2'-O-methylcytidine-3'-phosphorothioate
  modified_base 2: mod_base = OTHER; note = 2'-O-methylcytidine-3'-phosphorothioate
  modified_base 3: mod_base = OTHER; note = 2'-O-methyluridine-3'-phosphate
  modified_base 4: mod_base = OTHER; note = 2'-O-methylguanosine-3'-phosphate
  modified_base 5: mod_base = OTHER; note = 2'-O-methyluridine-3'-phosphate
  modified_base 6: mod_base = OTHER; note = 2'-O-methylguanosine-3'-phosphate
  modified_base 7: mod_base = OTHER; note = 2'-O-methylguanosine-3'-phosphate
  modified_base 8: mod_base = OTHER; note = 2'-O-methylcytidine-3'-phosphate
  modified_base 9: mod_base = OTHER; note = 2'-fluorouridine-3'-phosphate
  modified_base 10: mod_base = OTHER; note = 2'-fluoroguanosine-3'-phosphate
  modified_base 11: mod_base = OTHER; note = 2'-fluorocytidine-3'-phosphate
  modified_base 12: mod_base = OTHER; note = 2'-O-methyladenosine-3'-phosphate
  modified_base 13: mod_base = OTHER; note = 2'-O-methylguanosine-3'-phosphate
  modified_base 14: mod_base = OTHER; note = 2'-O-methylcytidine-3'-phosphate
  modified_base 15: mod_base = OTHER; note = 2'-O-methyluridine-3'-phosphate
  modified_base 16: mod_base = OTHER; note = 2'-O-methyladenosine-3'-phosphate
  modified_base 17: mod_base = OTHER; note = 2'-O-methylguanosine-3'-phosphate
  modified_base 18: mod_base = OTHER; note = 2'-O-methylcytidine-3'-phosphate
  modified_base 19: mod_base = OTHER; note = 2'-O-methyladenosine-3'-phosphate
  modified_base 20: mod_base = OTHER; note = 2'-O-methyladenosine-3'-phosphate
  modified_base 21: mod_base = OTHER; note = 2'-O-methyluridine-3'-phosphate N-[tris(GalNAc-alkyl)-amidodecanoyl)]-4-hydroxyprolinol (Hyp-(GalNAc-alkyl)3)
cctgtggctgcagctagcaat

SEQ ID NO: 6941 - RNA, 21 nt, synthetic construct
  source 1..21: mol_type = other RNA
  modified_base 1: mod_base = OTHER; note = 2'-O-methylcytidine-3'-phosphorothioate
  modified_base 2: mod_base = OTHER; note = 2'-O-methyluridine-3'-phosphorothioate
  modified_base 3: mod_base = OTHER; note = 2'-O-methylguanosine-3'-phosphate
  modified_base 4: mod_base = OTHER; note = 2'-O-methyluridine-3'-phosphate
  modified_base 5: mod_base = OTHER; note = 2'-O-methylguanosine-3'-phosphate
  modified_base 6: mod_base = OTHER; note = 2'-O-methylguanosine-3'-phosphate
  modified_base 7: mod_base = OTHER; note = 2'-O-methylcytidine-3'-phosphate
  modified_base 8: mod_base = OTHER; note = 2'-O-methyluridine-3'-phosphate
  modified_base 9: mod_base = OTHER; note = 2'-fluoroguanosine-3'-phosphate
  modified_base 10: mod_base = OTHER; note = 2'-fluorocytidine-3'-phosphate
  modified_base 11: mod_base = OTHER; note = 2'-fluoroadenosine-3'-phosphate
  modified_base 12: mod_base = OTHER; note = 2'-O-methylguanosine-3'-phosphate
  modified_base 13: mod_base = OTHER; note = 2'-O-methylcytidine-3'-phosphate
  modified_base 14: mod_base = OTHER; note = 2'-O-methyluridine-3'-phosphate
  modified_base 15: mod_base = OTHER; note = 2'-O-methyladenosine-3'-phosphate
  modified_base 16: mod_base = OTHER; note = 2'-O-methylguanosine-3'-phosphate
  modified_base 17: mod_base = OTHER; note = 2'-O-methylcytidine-3'-phosphate
  modified_base 18: mod_base = OTHER; note = 2'-O-methyladenosine-3'-phosphate
  modified_base 19: mod_base = OTHER; note = 2'-O-methyladenosine-3'-phosphate
  modified_base 20: mod_base = OTHER; note = 2'-O-methylguanosine-3'-phosphate
  modified_base 21: mod_base = OTHER; note = 2'-O-methyluridine-3'-phosphate N-[tris(GalNAc-alkyl)-amidodecanoyl)]-4-hydroxyprolinol (Hyp-(GalNAc-alkyl)3)
ctgtggctgcagctagcaagt

SEQ ID NO: 6942 - RNA, 21 nt, synthetic construct
  source 1..21: mol_type = other RNA
  modified_base 1: mod_base = OTHER; note = 2'-O-methyluridine-3'-phosphorothioate
  modified_base 2: mod_base = OTHER; note = 2'-O-methylguanosine-3'-phosphorothioate
  modified_base 3: mod_base = OTHER; note = 2'-O-methyluridine-3'-phosphate
  modified_base 4: mod_base = OTHER; note = 2'-O-methylguanosine-3'-phosphate
  modified_base 5: mod_base = OTHER; note = 2'-O-methylguanosine-3'-phosphate
  modified_base 6: mod_base = OTHER; note = 2'-O-methylcytidine-3'-phosphate
  modified_base 7: mod_base = OTHER; note = 2'-O-methyluridine-3'-phosphate
  modified_base 8: mod_base = OTHER; note = 2'-O-methylguanosine-3'-phosphate
  modified_base 9: mod_base = OTHER; note = 2'-fluorocytidine-3'-phosphate
  modified_base 10: mod_base = OTHER; note = 2'-fluoroadenosine-3'-phosphate
  modified_base 11: mod_base = OTHER; note = 2'-fluoroguanosine-3'-phosphate
  modified_base 12: mod_base = OTHER; note = 2'-O-methylcytidine-3'-phosphate
  modified_base 13: mod_base = OTHER; note = 2'-O-methyluridine-3'-phosphate
  modified_base 14: mod_base = OTHER; note = 2'-O-methyladenosine-3'-phosphate
  modified_base 15: mod_base = OTHER; note = 2'-O-methylguanosine-3'-phosphate
  modified_base 16: mod_base = OTHER; note = 2'-O-methylcytidine-3'-phosphate
  modified_base 17: mod_base = OTHER; note = 2'-O-methyladenosine-3'-phosphate
  modified_base 18: mod_base = OTHER; note = 2'-O-methyladenosine-3'-phosphate
  modified_base 19: mod_base = OTHER; note = 2'-O-methylguanosine-3'-phosphate
  modified_base 20: mod_base = OTHER; note = 2'-O-methyladenosine-3'-phosphate
  modified_base 21: mod_base = OTHER; note = 2'-O-methyluridine-3'-phosphate N-[tris(GalNAc-alkyl)-amidodecanoyl)]-4-hydroxyprolinol (Hyp-(GalNAc-alkyl)3)
tgtggctgcagctagcaagat

SEQ ID NO: 6943 - RNA, 21 nt, synthetic construct
  source 1..21: mol_type = other RNA
  modified_base 1: mod_base = OTHER; note = 2'-O-methylguanosine-3'-phosphorothioate
  modified_base 2: mod_base = OTHER; note = 2'-O-methyluridine-3'-phosphorothioate
  modified_base 3: mod_base = OTHER; note = 2'-O-methylguanosine-3'-phosphate
  modified_base 4: mod_base = OTHER; note = 2'-O-methylguanosine-3'-phosphate
  modified_base 5: mod_base = OTHER; note = 2'-O-methylcytidine-3'-phosphate
  modified_base 6: mod_base = OTHER; note = 2'-O-methyluridine-3'-phosphate
  modified_base 7: mod_base = OTHER; note = 2'-O-methylguanosine-3'-phosphate
  modified_base 8: mod_base = OTHER; note = 2'-O-methylcytidine-3'-phosphate
  modified_base 9: mod_base = OTHER; note = 2'-fluoroadenosine-3'-phosphate
  modified_base 10: mod_base = OTHER; note = 2'-fluoroguanosine-3'-phosphate
  modified_base 11: mod_base = OTHER; note = 2'-fluorocytidine-3'-phosphate
  modified_base 12: mod_base = OTHER; note = 2'-O-methyluridine-3'-phosphate
  modified_base 13: mod_base = OTHER; note = 2'-O-methyladenosine-3'-phosphate
  modified_base 14: mod_base = OTHER; note = 2'-O-methylguanosine-3'-phosphate
  modified_base 15: mod_base = OTHER; note = 2'-O-methylcytidine-3'-phosphate
  modified_base 16: mod_base = OTHER; note = 2'-O-methyladenosine-3'-phosphate
  modified_base 17: mod_base = OTHER; note = 2'-O-methyladenosine-3'-phosphate
  modified_base 18: mod_base = OTHER; note = 2'-O-methylguanosine-3'-phosphate
  modified_base 19: mod_base = OTHER; note = 2'-O-methyladenosine-3'-phosphate
  modified_base 20: mod_base = OTHER; note = 2'-O-methylguanosine-3'-phosphate
  modified_base 21: mod_base = OTHER; note = 2'-O-methyluridine-3'-phosphate N-[tris(GalNAc-alkyl)-amidodecanoyl)]-4-hydroxyprolinol (Hyp-(GalNAc-alkyl)3)
gtggctgcagctagcaagagt

SEQ ID NO: 6944 - RNA, 21 nt, synthetic construct
  source 1..21: mol_type = other RNA
  modified_base 1: mod_base = OTHER; note = 2'-O-methyluridine-3'-phosphorothioate
  modified_base 2: mod_base = OTHER; note = 2'-O-methylguanosine-3'-phosphorothioate
  modified_base 3: mod_base = OTHER; note = 2'-O-methylguanosine-3'-phosphate
  modified_base 4: mod_base = OTHER; note = 2'-O-methylcytidine-3'-phosphate
  modified_base 5: mod_base = OTHER; note = 2'-O-methyluridine-3'-phosphate
  modified_base 6: mod_base = OTHER; note = 2'-O-methylguanosine-3'-phosphate
  modified_base 7: mod_base = OTHER; note = 2'-O-methylcytidine-3'-phosphate
  modified_base 8: mod_base = OTHER; note = 2'-O-methyladenosine-3'-phosphate
  modified_base 9: mod_base = OTHER; note = 2'-fluoroguanosine-3'-phosphate
  modified_base 10: mod_base = OTHER; note = 2'-fluorocytidine-3'-phosphate
  modified_base 11: mod_base = OTHER; note = 2'-fluorouridine-3'-phosphate
  modified_base 12: mod_base = OTHER; note = 2'-O-methyladenosine-3'-phosphate
  modified_base 13: mod_base = OTHER; note = 2'-O-methylguanosine-3'-phosphate
  modified_base 14: mod_base = OTHER; note = 2'-O-methylcytidine-3'-phosphate
  modified_base 15: mod_base = OTHER; note = 2'-O-methyladenosine-3'-phosphate
  modified_base 16: mod_base = OTHER; note = 2'-O-methyladenosine-3'-phosphate
  modified_base 17: mod_base = OTHER; note = 2'-O-methylguanosine-3'-phosphate
  modified_base 18: mod_base = OTHER; note = 2'-O-methyladenosine-3'-phosphate
  modified_base 19: mod_base = OTHER; note = 2'-O-methylguanosine-3'-phosphate
  modified_base 20: mod_base = OTHER; note = 2'-O-methylguanosine-3'-phosphate
  modified_base 21: mod_base = OTHER; note = 2'-O-methyluridine-3'-phosphate N-[tris(GalNAc-alkyl)-amidodecanoyl)]-4-hydroxyprolinol (Hyp-(GalNAc-alkyl)3)
tggctgcagctagcaagaggt

SEQ ID NO: 6945 - RNA, 21 nt, synthetic construct
  source 1..21: mol_type = other RNA
  modified_base 1: mod_base = OTHER; note = 2'-O-methylguanosine-3'-phosphorothioate
  modified_base 2: mod_base = OTHER; note = 2'-O-methylguanosine-3'-phosphorothioate
  modified_base 3: mod_base = OTHER; note = 2'-O-methylcytidine-3'-phosphate
  modified_base 4: mod_base = OTHER; note = 2'-O-methyluridine-3'-phosphate
  modified_base 5: mod_base = OTHER; note = 2'-O-methylguanosine-3'-phosphate
  modified_base 6: mod_base = OTHER; note = 2'-O-methylcytidine-3'-phosphate
  modified_base 7: mod_base = OTHER; note = 2'-O-methyladenosine-3'-phosphate
  modified_base 8: mod_base = OTHER; note = 2'-O-methylguanosine-3'-phosphate
  modified_base 9: mod_base = OTHER; note = 2'-fluorocytidine-3'-phosphate
  modified_base 10: mod_base = OTHER; note = 2'-fluorouridine-3'-phosphate
  modified_base 11: mod_base = OTHER; note = 2'-fluoroadenosine-3'-phosphate
  modified_base 12: mod_base = OTHER; note = 2'-O-methylguanosine-3'-phosphate
  modified_base 13: mod_base = OTHER; note = 2'-O-methylcytidine-3'-phosphate
  modified_base 14: mod_base = OTHER; note = 2'-O-methyladenosine-3'-phosphate
  modified_base 15: mod_base = OTHER; note = 2'-O-methyladenosine-3'-phosphate
  modified_base 16: mod_base = OTHER; note = 2'-O-methylguanosine-3'-phosphate
  modified_base 17: mod_base = OTHER; note = 2'-O-methyladenosine-3'-phosphate
  modified_base 18: mod_base = OTHER; note = 2'-O-methylguanosine-3'-phosphate
  modified_base 19: mod_base = OTHER; note = 2'-O-methylguanosine-3'-phosphate
  modified_base 20: mod_base = OTHER; note = 2'-O-methyladenosine-3'-phosphate
  modified_base 21: mod_base = OTHER; note = 2'-O-methyluridine-3'-phosphate N-[tris(GalNAc-alkyl)-amidodecanoyl)]-4-hydroxyprolinol (Hyp-(GalNAc-alkyl)3)
ggctgcagctagcaagaggat

SEQ ID NO: 6946 - RNA, 21 nt, synthetic construct
  source 1..21: mol_type = other RNA
  modified_base 1: mod_base = OTHER; note = 2'-O-methylguanosine-3'-phosphorothioate
  modified_base 2: mod_base = OTHER; note = 2'-O-methylcytidine-3'-phosphorothioate
  modified_base 3: mod_base = OTHER; note = 2'-O-methyluridine-3'-phosphate
  modified_base 4: mod_base = OTHER; note = 2'-O-methylguanosine-3'-phosphate
  modified_base 5: mod_base = OTHER; note = 2'-O-methylcytidine-3'-phosphate
  modified_base 6: mod_base = OTHER; note = 2'-O-methyladenosine-3'-phosphate
  modified_base 7: mod_base = OTHER; note = 2'-O-methylguanosine-3'-phosphate
  modified_base 8: mod_base = OTHER; note = 2'-O-methylcytidine-3'-phosphate
  modified_base 9: mod_base = OTHER; note = 2'-fluorouridine-3'-phosphate
  modified_base 10: mod_base = OTHER; note = 2'-fluoroadenosine-3'-phosphate
  modified_base 11: mod_base = OTHER; note = 2'-fluoroguanosine-3'-phosphate
  modified_base 12: mod_base = OTHER; note = 2'-O-methylcytidine-3'-phosphate
  modified_base 13: mod_base = OTHER; note = 2'-O-methyladenosine-3'-phosphate
  modified_base 14: mod_base = OTHER; note = 2'-O-methyladenosine-3'-phosphate
  modified_base 15: mod_base = OTHER; note = 2'-O-methylguanosine-3'-phosphate
  modified_base 16: mod_base = OTHER; note = 2'-O-methyladenosine-3'-phosphate
  modified_base 17: mod_base = OTHER; note = 2'-O-methylguanosine-3'-phosphate
  modified_base 18: mod_base = OTHER; note = 2'-O-methylguanosine-3'-phosphate
  modified_base 19: mod_base = OTHER; note = 2'-O-methyladenosine-3'-phosphate
  modified_base 20: mod_base = OTHER; note = 2'-O-methylcytidine-3'-phosphate
  modified_base 21: mod_base = OTHER; note = 2'-O-methyluridine-3'-phosphate N-[tris(GalNAc-alkyl)-amidodecanoyl)]-4-hydroxyprolinol (Hyp-(GalNAc-alkyl)3)
gctgcagctagcaagaggact

SEQ ID NO: 6947 - RNA, 21 nt, synthetic construct
  source 1..21: mol_type = other RNA
  modified_base 1: mod_base = OTHER; note = 2'-O-methylcytidine-3'-phosphorothioate
  modified_base 2: mod_base = OTHER; note = 2'-O-methyluridine-3'-phosphorothioate
  modified_base 3: mod_base = OTHER; note = 2'-O-methylguanosine-3'-phosphate
  modified_base 4: mod_base = OTHER; note = 2'-O-methylcytidine-3'-phosphate
  modified_base 5: mod_base = OTHER; note = 2'-O-methyladenosine-3'-phosphate
  modified_base 6: mod_base = OTHER; note = 2'-O-methylguanosine-3'-phosphate
  modified_base 7: mod_base = OTHER; note = 2'-O-methylcytidine-3'-phosphate
  modified_base 8: mod_base = OTHER; note = 2'-O-methyluridine-3'-phosphate
  modified_base 9: mod_base = OTHER; note = 2'-fluoroadenosine-3'-phosphate
  modified_base 10: mod_base = OTHER; note = 2'-fluoroguanosine-3'-phosphate
  modified_base 11: mod_base = OTHER; note = 2'-fluorocytidine-3'-phosphate
  modified_base 12: mod_base = OTHER; note = 2'-O-methyladenosine-3'-phosphate
  modified_base 13: mod_base = OTHER; note = 2'-O-methyladenosine-3'-phosphate
  modified_base 14: mod_base = OTHER; note = 2'-O-methylguanosine-3'-phosphate
  modified_base 15: mod_base = OTHER; note = 2'-O-methyladenosine-3'-phosphate
  modified_base 16: mod_base = OTHER; note = 2'-O-methylguanosine-3'-phosphate
  modified_base 17: mod_base = OTHER; note = 2'-O-methylguanosine-3'-phosphate
  modified_base 18: mod_base = OTHER; note = 2'-O-methyladenosine-3'-phosphate
  modified_base 19: mod_base = OTHER; note = 2'-O-methylcytidine-3'-phosphate
  modified_base 20: mod_base = OTHER; note = 2'-O-methylcytidine-3'-phosphate
  modified_base 21: mod_base = OTHER; note = 2'-O-methyluridine-3'-phosphate N-[tris(GalNAc-alkyl)-amidodecanoyl)]-4-hydroxyprolinol (Hyp-(GalNAc-alkyl)3)
ctgcagctagcaagaggacct

SEQ ID NO: 6948 - RNA, 21 nt, synthetic construct
  source 1..21: mol_type = other RNA
  modified_base 1: mod_base = OTHER; note = 2'-O-methyluridine-3'-phosphorothioate
  modified_base 2: mod_base = OTHER; note = 2'-O-methylguanosine-3'-phosphorothioate
  modified_base 3: mod_base = OTHER; note = 2'-O-methylcytidine-3'-phosphate
  modified_base 4: mod_base = OTHER; note = 2'-O-methyladenosine-3'-phosphate
  modified_base 5: mod_base = OTHER; note = 2'-O-methylguanosine-3'-phosphate
  modified_base 6: mod_base = OTHER; note = 2'-O-methylcytidine-3'-phosphate
  modified_base 7: mod_base = OTHER; note = 2'-O-methyluridine-3'-phosphate
  modified_base 8: mod_base = OTHER; note = 2'-O-methyladenosine-3'-phosphate
  modified_base 9: mod_base = OTHER; note = 2'-fluoroguanosine-3'-phosphate
  modified_base 10: mod_base = OTHER; note = 2'-fluorocytidine-3'-phosphate
  modified_base 11: mod_base = OTHER; note = 2'-fluoroadenosine-3'-phosphate
  modified_base 12: mod_base = OTHER; note = 2'-O-methyladenosine-3'-phosphate
  modified_base 13: mod_base = OTHER; note = 2'-O-methylguanosine-3'-phosphate
  modified_base 14: mod_base = OTHER; note = 2'-O-methyladenosine-3'-phosphate
  modified_base 15: mod_base = OTHER; note = 2'-O-methylguanosine-3'-phosphate
  modified_base 16: mod_base = OTHER; note = 2'-O-methylguanosine-3'-phosphate
  modified_base 17: mod_base = OTHER; note = 2'-O-methyladenosine-3'-phosphate
  modified_base 18: mod_base = OTHER; note = 2'-O-methylcytidine-3'-phosphate
  modified_base 19: mod_base = OTHER; note = 2'-O-methylcytidine-3'-phosphate
  modified_base 20: mod_base = OTHER; note = 2'-O-methyluridine-3'-phosphate
  modified_base 21: mod_base = OTHER; note = 2'-O-methyluridine-3'-phosphate N-[tris(GalNAc-alkyl)-amidodecanoyl)]-4-hydroxyprolinol (Hyp-(GalNAc-alkyl)3)
tgcagctagcaagaggacctt

SEQ ID NO: 6949 - RNA, 21 nt, synthetic construct
  source 1..21: mol_type = other RNA
  modified_base 1: mod_base = OTHER; note = 2'-O-methylguanosine-3'-phosphorothioate
  modified_base 2: mod_base = OTHER; note = 2'-O-methylcytidine-3'-phosphorothioate
  modified_base 3: mod_base = OTHER; note = 2'-O-methyladenosine-3'-phosphate
  modified_base 4: mod_base = OTHER; note = 2'-O-methylguanosine-3'-phosphate
  modified_base 5: mod_base = OTHER; note = 2'-O-methylcytidine-3'-phosphate
  modified_base 6: mod_base = OTHER; note = 2'-O-methyluridine-3'-phosphate
  modified_base 7: mod_base = OTHER; note = 2'-O-methyladenosine-3'-phosphate
  modified_base 8: mod_base = OTHER; note = 2'-O-methylguanosine-3'-phosphate
  modified_base 9: mod_base = OTHER; note = 2'-fluorocytidine-3'-phosphate
  modified_base 10: mod_base = OTHER; note = 2'-fluoroadenosine-3'-phosphate
  modified_base 11: mod_base = OTHER; note = 2'-fluoroadenosine-3'-phosphate
  modified_base 12: mod_base = OTHER; note = 2'-O-methylguanosine-3'-phosphate
  modified_base 13: mod_base = OTHER; note = 2'-O-methyladenosine-3'-phosphate
  modified_base 14: mod_base = OTHER; note = 2'-O-methylguanosine-3'-phosphate
  modified_base 15: mod_base = OTHER; note = 2'-O-methylguanosine-3'-phosphate
  modified_base 16: mod_base = OTHER; note = 2'-O-methyladenosine-3'-phosphate
  modified_base 17: mod_base = OTHER; note = 2'-O-methylcytidine-3'-phosphate
  modified_base 18: mod_base = OTHER; note = 2'-O-methylcytidine-3'-phosphate
  modified_base 19: mod_base = OTHER; note = 2'-O-methyluridine-3'-phosphate
  modified_base 20: mod_base = OTHER; note = 2'-O-methylguanosine-3'-phosphate
  modified_base 21: mod_base = OTHER; note = 2'-O-methyluridine-3'-phosphate N-[tris(GalNAc-alkyl)-amidodecanoyl)]-4-hydroxyprolinol (Hyp-(GalNAc-alkyl)3)
gcagctagcaagaggacctgt

SEQ ID NO: 6950 - RNA, 21 nt, synthetic construct
  source 1..21: mol_type = other RNA
  modified_base 1: mod_base = OTHER; note = 2'-O-methylcytidine-3'-phosphorothioate
  modified_base 2: mod_base = OTHER; note = 2'-O-methyladenosine-3'-phosphorothioate
  modified_base 3: mod_base = OTHER; note = 2'-O-methylguanosine-3'-phosphate
  modified_base 4: mod_base = OTHER; note = 2'-O-methylcytidine-3'-phosphate
  modified_base 5: mod_base = OTHER; note = 2'-O-methyluridine-3'-phosphate
  modified_base 6: mod_base = OTHER; note = 2'-O-methyladenosine-3'-phosphate
  modified_base 7: mod_base = OTHER; note = 2'-O-methylguanosine-3'-phosphate
  modified_base 8: mod_base = OTHER; note = 2'-O-methylcytidine-3'-phosphate
  modified_base 9: mod_base = OTHER; note = 2'-fluoroadenosine-3'-phosphate
  modified_base 10: mod_base = OTHER; note = 2'-fluoroadenosine-3'-phosphate
  modified_base 11: mod_base = OTHER; note = 2'-fluoroguanosine-3'-phosphate
  modified_base 12: mod_base = OTHER; note = 2'-O-methyladenosine-3'-phosphate
  modified_base 13: mod_base = OTHER; note = 2'-O-methylguanosine-3'-phosphate
  modified_base 14: mod_base = OTHER; note = 2'-O-methylguanosine-3'-phosphate
  modified_base 15: mod_base = OTHER; note = 2'-O-methyladenosine-3'-phosphate
  modified_base 16: mod_base = OTHER; note = 2'-O-methylcytidine-3'-phosphate
  modified_base 17: mod_base = OTHER; note = 2'-O-methylcytidine-3'-phosphate
  modified_base 18: mod_base = OTHER; note = 2'-O-methyluridine-3'-phosphate
  modified_base 19: mod_base = OTHER; note = 2'-O-methylguanosine-3'-phosphate
  modified_base 20: mod_base = OTHER; note = 2'-O-methylguanosine-3'-phosphate
  modified_base 21: mod_base = OTHER; note = 2'-O-methyluridine-3'-phosphate N-[tris(GalNAc-alkyl)-amidodecanoyl)]-4-hydroxyprolinol (Hyp-(GalNAc-alkyl)3)
cagctagcaagaggacctggt

SEQ ID NO: 6951 - RNA, 21 nt, synthetic construct
  source 1..21: mol_type = other RNA
  modified_base 1: mod_base = OTHER; note = 2'-O-methylguanosine-3'-phosphorothioate
  modified_base 2: mod_base = OTHER; note = 2'-O-methylcytidine-3'-phosphorothioate
  modified_base 3: mod_base = OTHER; note = 2'-O-methyluridine-3'-phosphate
  modified_base 4: mod_base = OTHER; note = 2'-O-methyluridine-3'-phosphate
  modified_base 5: mod_base = OTHER; note = 2'-O-methyluridine-3'-phosphate
  modified_base 6: mod_base = OTHER; note = 2'-O-methylguanosine-3'-phosphate
  modified_base 7: mod_base = OTHER; note = 2'-O-methylguanosine-3'-phosphate
  modified_base 8: mod_base = OTHER; note = 2'-O-methyladenosine-3'-phosphate
  modified_base 9: mod_base = OTHER; note = 2'-fluoroguanosine-3'-phosphate
  modified_base 10: mod_base = OTHER; note = 2'-fluorouridine-3'-phosphate
  modified_base 11: mod_base = OTHER; note = 2'-fluoroguanosine-3'-phosphate
  modified_base 12: mod_base = OTHER; note = 2'-O-methyladenosine-3'-phosphate
  modified_base 13: mod_base = OTHER; note = 2'-O-methyladenosine-3'-phosphate
  modified_base 14: mod_base = OTHER; note = 2'-O-methylguanosine-3'-phosphate
  modified_base 15: mod_base = OTHER; note = 2'-O-methyladenosine-3'-phosphate
  modified_base 16: mod_base = OTHER; note = 2'-O-methylguanosine-3'-phosphate
  modified_base 17: mod_base = OTHER; note = 2'-O-methyladenosine-3'-phosphate
  modified_base 18: mod_base = OTHER; note = 2'-O-methylcytidine-3'-phosphate
  modified_base 19: mod_base = OTHER; note = 2'-O-methylcytidine-3'-phosphate
  modified_base 20: mod_base = OTHER; note = 2'-O-methyladenosine-3'-phosphate
  modified_base 21: mod_base = OTHER; note = 2'-O-methyluridine-3'-phosphate N-[tris(GalNAc-alkyl)-amidodecanoyl)]-4-hydroxyprolinol (Hyp-(GalNAc-alkyl)3)
gctttggagtgaagagaccat

SEQ ID NO: 6952 - RNA, 21 nt, synthetic construct
  source 1..21: mol_type = other RNA
  modified_base 1: mod_base = OTHER; note = 2'-O-methylcytidine-3'-phosphorothioate
  modified_base 2: mod_base = OTHER; note = 2'-O-methyluridine-3'-phosphorothioate
  modified_base 3: mod_base = OTHER; note = 2'-O-methyluridine-3'-phosphate
  modified_base 4: mod_base = OTHER; note = 2'-O-methyluridine-3'-phosphate
  modified_base 5: mod_base = OTHER; note = 2'-O-methylguanosine-3'-phosphate
  modified_base 6: mod_base = OTHER; note = 2'-O-methylguanosine-3'-phosphate
  modified_base 7: mod_base = OTHER; note = 2'-O-methyladenosine-3'-phosphate
  modified_base 8: mod_base = OTHER; note = 2'-O-methylguanosine-3'-phosphate
  modified_base 9: mod_base = OTHER; note = 2'-fluorouridine-3'-phosphate
  modified_base 10: mod_base = OTHER; note = 2'-fluoroguanosine-3'-phosphate
  modified_base 11: mod_base = OTHER; note = 2'-fluoroadenosine-3'-phosphate
  modified_base 12: mod_base = OTHER; note = 2'-O-methyladenosine-3'-phosphate
  modified_base 13: mod_base = OTHER; note = 2'-O-methylguanosine-3'-phosphate
  modified_base 14: mod_base = OTHER; note = 2'-O-methyladenosine-3'-phosphate
  modified_base 15: mod_base = OTHER; note = 2'-O-methylguanosine-3'-phosphate
  modified_base 16: mod_base = OTHER; note = 2'-O-methyladenosine-3'-phosphate
  modified_base 17: mod_base = OTHER; note = 2'-O-methylcytidine-3'-phosphate
  modified_base 18: mod_base = OTHER; note = 2'-O-methylcytidine-3'-phosphate
  modified_base 19: mod_base = OTHER; note = 2'-O-methyladenosine-3'-phosphate
  modified_base 20: mod_base = OTHER; note = 2'-O-methyladenosine-3'-phosphate
  modified_base 21: mod_base = OTHER; note = 2'-O-methyluridine-3'-phosphate N-[tris(GalNAc-alkyl)-amidodecanoyl)]-4-hydroxyprolinol (Hyp-(GalNAc-alkyl)3)
ctttggagtgaagagaccaat

SEQ ID NO: 6953 - RNA, 21 nt, synthetic construct
  source 1..21: mol_type = other RNA
  modified_base 1: mod_base = OTHER; note = 2'-O-methyluridine-3'-phosphorothioate
  modified_base 2: mod_base = OTHER; note = 2'-O-methyluridine-3'-phosphorothioate
  modified_base 3: mod_base = OTHER; note = 2'-O-methyluridine-3'-phosphate
  modified_base 4: mod_base = OTHER; note = 2'-O-methylguanosine-3'-phosphate
  modified_base 5: mod_base = OTHER; note = 2'-O-methylguanosine-3'-phosphate
  modified_base 6: mod_base = OTHER; note = 2'-O-methyladenosine-3'-phosphate
  modified_base 7: mod_base = OTHER; note = 2'-O-methylguanosine-3'-phosphate
  modified_base 8: mod_base = OTHER; note = 2'-O-methyluridine-3'-phosphate
  modified_base 9: mod_base = OTHER; note = 2'-fluoroguanosine-3'-phosphate
  modified_base 10: mod_base = OTHER; note = 2'-fluoroadenosine-3'-phosphate
  modified_base 11: mod_base = OTHER; note = 2'-fluoroadenosine-3'-phosphate
  modified_base 12: mod_base = OTHER; note = 2'-O-methylguanosine-3'-phosphate
  modified_base 13: mod_base = OTHER; note = 2'-O-methyladenosine-3'-phosphate
  modified_base 14: mod_base = OTHER; note = 2'-O-methylguanosine-3'-phosphate
  modified_base 15: mod_base = OTHER; note = 2'-O-methyladenosine-3'-phosphate
  modified_base 16: mod_base = OTHER; note = 2'-O-methylcytidine-3'-phosphate
  modified_base 17: mod_base = OTHER; note = 2'-O-methylcytidine-3'-phosphate
  modified_base 18: mod_base = OTHER; note = 2'-O-methyladenosine-3'-phosphate
  modified_base 19: mod_base = OTHER; note = 2'-O-methyladenosine-3'-phosphate
  modified_base 20: mod_base = OTHER; note = 2'-O-methylguanosine-3'-phosphate
  modified_base 21: mod_base = OTHER; note = 2'-O-methyluridine-3'-phosphate N-[tris(GalNAc-alkyl)-amidodecanoyl)]-4-hydroxyprolinol (Hyp-(GalNAc-alkyl)3)
tttggagtgaagagaccaagt

SEQ ID NO: 6954 - RNA, 21 nt, synthetic construct
  source 1..21: mol_type = other RNA
  modified_base 1: mod_base = OTHER; note = 2'-O-methyluridine-3'-phosphorothioate
  modified_base 2: mod_base = OTHER; note = 2'-O-methylguanosine-3'-phosphorothioate
  modified_base 3: mod_base = OTHER; note = 2'-O-methylguanosine-3'-phosphate
  modified_base 4: mod_base = OTHER; note = 2'-O-methyladenosine-3'-phosphate
  modified_base 5: mod_base = OTHER; note = 2'-O-methylguanosine-3'-phosphate
  modified_base 6: mod_base = OTHER; note = 2'-O-methyluridine-3'-phosphate
  modified_base 7: mod_base = OTHER; note = 2'-O-methylguanosine-3'-phosphate
  modified_base 8: mod_base = OTHER; note = 2'-O-methyladenosine-3'-phosphate
  modified_base 9: mod_base = OTHER; note = 2'-fluoroadenosine-3'-phosphate
  modified_base 10: mod_base = OTHER; note = 2'-fluoroguanosine-3'-phosphate
  modified_base 11: mod_base = OTHER; note = 2'-fluoroadenosine-3'-phosphate
  modified_base 12: mod_base = OTHER; note = 2'-O-methylguanosine-3'-phosphate
  modified_base 13: mod_base = OTHER; note = 2'-O-methyladenosine-3'-phosphate
  modified_base 14: mod_base = OTHER; note = 2'-O-methylcytidine-3'-phosphate
  modified_base 15: mod_base = OTHER; note = 2'-O-methylcytidine-3'-phosphate
  modified_base 16: mod_base = OTHER; note = 2'-O-methyladenosine-3'-phosphate
  modified_base 17: mod_base = OTHER; note = 2'-O-methyladenosine-3'-phosphate
  modified_base 18: mod_base = OTHER; note = 2'-O-methylguanosine-3'-phosphate
  modified_base 19: mod_base = OTHER; note = 2'-O-methyladenosine-3'-phosphate
  modified_base 20: mod_base = OTHER; note = 2'-O-methyluridine-3'-phosphate
  modified_base 21: mod_base = OTHER; note = 2'-O-methyluridine-3'-phosphate N-[tris(GalNAc-alkyl)-amidodecanoyl)]-4-hydroxyprolinol (Hyp-(GalNAc-alkyl)3)
tggagtgaagagaccaagatt

SEQ ID NO: 6955 - RNA, 21 nt, synthetic construct
  source 1..21: mol_type = other RNA
  modified_base 1: mod_base = OTHER; note = 2'-O-methylguanosine-3'-phosphorothioate
  modified_base 2: mod_base = OTHER; note = 2'-O-methylguanosine-3'-phosphorothioate
  modified_base 3: mod_base = OTHER; note = 2'-O-methyladenosine-3'-phosphate
  modified_base 4: mod_base = OTHER; note = 2'-O-methylguanosine-3'-phosphate
  modified_base 5: mod_base = OTHER; note = 2'-O-methyluridine-3'-phosphate
  modified_base 6: mod_base = OTHER; note = 2'-O-methylguanosine-3'-phosphate
  modified_base 7: mod_base = OTHER; note = 2'-O-methyladenosine-3'-phosphate
  modified_base 8: mod_base = OTHER; note = 2'-O-methyladenosine-3'-phosphate
  modified_base 9: mod_base = OTHER; note = 2'-fluoroguanosine-3'-phosphate
  modified_base 10: mod_base = OTHER; note = 2'-fluoroadenosine-3'-phosphate
  modified_base 11: mod_base = OTHER; note = 2'-fluoroguanosine-3'-phosphate
  modified_base 12: mod_base = OTHER; note = 2'-O-methyladenosine-3'-phosphate
  modified_base 13: mod_base = OTHER; note = 2'-O-methylcytidine-3'-phosphate
  modified_base 14: mod_base = OTHER; note = 2'-O-methylcytidine-3'-phosphate
  modified_base 15: mod_base = OTHER; note = 2'-O-methyladenosine-3'-phosphate
  modified_base 16: mod_base = OTHER; note = 2'-O-methyladenosine-3'-phosphate
  modified_base 17: mod_base = OTHER; note = 2'-O-methylguanosine-3'-phosphate
  modified_base 18: mod_base = OTHER; note = 2'-O-methyladenosine-3'-phosphate
  modified_base 19: mod_base = OTHER; note = 2'-O-methyluridine-3'-phosphate
  modified_base 20: mod_base = OTHER; note = 2'-O-methylguanosine-3'-phosphate
  modified_base 21: mod_base = OTHER; note = 2'-O-methyluridine-3'-phosphate N-[tris(GalNAc-alkyl)-amidodecanoyl)]-4-hydroxyprolinol (Hyp-(GalNAc-alkyl)3)
ggagtgaagagaccaagatgt

SEQ ID NO: 6956 - RNA, 21 nt, synthetic construct
  source 1..21: mol_type = other RNA
  modified_base 1: mod_base = OTHER; note = 2'-O-methylguanosine-3'-phosphorothioate
  modified_base 2: mod_base = OTHER; note = 2'-O-methyladenosine-3'-phosphorothioate
  modified_base 3: mod_base = OTHER; note = 2'-O-methylguanosine-3'-phosphate
  modified_base 4: mod_base = OTHER; note = 2'-O-methyluridine-3'-phosphate
  modified_base 5: mod_base = OTHER; note = 2'-O-methylguanosine-3'-phosphate
  modified_base 6: mod_base = OTHER; note = 2'-O-methyladenosine-3'-phosphate
  modified_base 7: mod_base = OTHER; note = 2'-O-methyladenosine-3'-phosphate
  modified_base 8: mod_base = OTHER; note = 2'-O-methylguanosine-3'-phosphate
  modified_base 9: mod_base = OTHER; note = 2'-fluoroadenosine-3'-phosphate
  modified_base 10: mod_base = OTHER; note = 2'-fluoroguanosine-3'-phosphate
  modified_base 11: mod_base = OTHER; note = 2'-fluoroadenosine-3'-phosphate
  modified_base 12: mod_base = OTHER; note = 2'-O-methylcytidine-3'-phosphate
  modified_base 13: mod_base = OTHER; note = 2'-O-methylcytidine-3'-phosphate
  modified_base 14: mod_base = OTHER; note = 2'-O-methyladenosine-3'-phosphate
  modified_base 15: mod_base = OTHER; note = 2'-O-methyladenosine-3'-phosphate
  modified_base 16: mod_base = OTHER; note = 2'-O-methylguanosine-3'-phosphate
  modified_base 17: mod_base = OTHER; note = 2'-O-methyladenosine-3'-phosphate
  modified_base 18: mod_base = OTHER; note = 2'-O-methyluridine-3'-phosphate
  modified_base 19: mod_base = OTHER; note = 2'-O-methylguanosine-3'-phosphate
  modified_base 20: mod_base = OTHER; note = 2'-O-methyladenosine-3'-phosphate
  modified_base 21: mod_base = OTHER; note = 2'-O-methyluridine-3'-phosphate N-[tris(GalNAc-alkyl)-amidodecanoyl)]-4-hydroxyprolinol (Hyp-(GalNAc-alkyl)3)
gagtgaagagaccaagatgat

SEQ ID NO: 6957 - RNA, 21 nt, synthetic construct
  source 1..21: mol_type = other RNA
  modified_base 1: mod_base = OTHER; note = 2'-O-methyluridine-3'-phosphorothioate
  modified_base 2: mod_base = OTHER; note = 2'-O-methylguanosine-3'-phosphorothioate
  modified_base 3: mod_base = OTHER; note = 2'-O-methyladenosine-3'-phosphate
  modified_base 4: mod_base = OTHER; note = 2'-O-methyladenosine-3'-phosphate
  modified_base 5: mod_base = OTHER; note = 2'-O-methylguanosine-3'-phosphate
  modified_base 6: mod_base = OTHER; note = 2'-O-methyladenosine-3'-phosphate
  modified_base 7: mod_base = OTHER; note = 2'-O-methylguanosine-3'-phosphate
  modified_base 8: mod_base = OTHER; note = 2'-O-methyladenosine-3'-phosphate
  modified_base 9: mod_base = OTHER; note = 2'-fluorocytidine-3'-phosphate
  modified_base 10: mod_base = OTHER; note = 2'-fluorocytidine-3'-phosphate
  modified_base 11: mod_base = OTHER; note = 2'-fluoroadenosine-3'-phosphate
  modified_base 12: mod_base = OTHER; note = 2'-O-methyladenosine-3'-phosphate
  modified_base 13: mod_base = OTHER; note = 2'-O-methylguanosine-3'-phosphate
  modified_base 14: mod_base = OTHER; note = 2'-O-methyladenosine-3'-phosphate
  modified_base 15: mod_base = OTHER; note = 2'-O-methyluridine-3'-phosphate
  modified_base 16: mod_base = OTHER; note = 2'-O-methylguanosine-3'-phosphate
  modified_base 17: mod_base = OTHER; note = 2'-O-methyladenosine-3'-phosphate
  modified_base 18: mod_base = OTHER; note = 2'-O-methyladenosine-3'-phosphate
  modified_base 19: mod_base = OTHER; note = 2'-O-methylguanosine-3'-phosphate
  modified_base 20: mod_base = OTHER; note = 2'-O-methyluridine-3'-phosphate
  modified_base 21: mod_base = OTHER; note = 2'-O-methyluridine-3'-phosphate N-[tris(GalNAc-alkyl)-amidodecanoyl)]-4-hydroxyprolinol (Hyp-(GalNAc-alkyl)3)
tgaagagaccaagatgaagtt

SEQ ID NO: 6958 - RNA, 21 nt, synthetic construct
  source 1..21: mol_type = other RNA
  modified_base 1: mod_base = OTHER; note = 2'-O-methyladenosine-3'-phosphorothioate
  modified_base 2: mod_base = OTHER; note = 2'-O-methyladenosine-3'-phosphorothioate
  modified_base 3: mod_base = OTHER; note = 2'-O-methylguanosine-3'-phosphate
  modified_base 4: mod_base = OTHER; note = 2'-O-methyladenosine-3'-phosphate
  modified_base 5: mod_base = OTHER; note = 2'-O-methylguanosine-3'-phosphate
  modified_base 6: mod_base = OTHER; note = 2'-O-methyladenosine-3'-phosphate
  modified_base 7: mod_base = OTHER; note = 2'-O-methylcytidine-3'-phosphate
  modified_base 8: mod_base = OTHER; note = 2'-O-methylcytidine-3'-phosphate
  modified_base 9: mod_base = OTHER; note = 2'-fluoroadenosine-3'-phosphate
  modified_base 10: mod_base = OTHER; note = 2'-fluoroadenosine-3'-phosphate
  modified_base 11: mod_base = OTHER; note = 2'-fluoroguanosine-3'-phosphate
  modified_base 12: mod_base = OTHER; note = 2'-O-methyladenosine-3'-phosphate
  modified_base 13: mod_base = OTHER; note = 2'-O-methyluridine-3'-phosphate
  modified_base 14: mod_base = OTHER; note = 2'-O-methylguanosine-3'-phosphate
  modified_base 15: mod_base = OTHER; note = 2'-O-methyladenosine-3'-phosphate
  modified_base 16: mod_base = OTHER; note = 2'-O-methyladenosine-3'-phosphate
  modified_base 17: mod_base = OTHER; note = 2'-O-methylguanosine-3'-phosphate
  modified_base 18: mod_base = OTHER; note = 2'-O-methyluridine-3'-phosphate
  modified_base 19: mod_base = OTHER; note = 2'-O-methyluridine-3'-phosphate
  modified_base 20: mod_base = OTHER; note = 2'-O-methyluridine-3'-phosphate
  modified_base 21: mod_base = OTHER; note = 2'-O-methyluridine-3'-phosphate N-[tris(GalNAc-alkyl)-amidodecanoyl)]-4-hydroxyprolinol (Hyp-(GalNAc-alkyl)3)
aagagaccaagatgaagtttt

SEQ ID NO: 6959 - RNA, 21 nt, synthetic construct
  source 1..21: mol_type = other RNA
  modified_base 1: mod_base = OTHER; note = 2'-O-methyladenosine-3'-phosphorothioate
  modified_base 2: mod_base = OTHER; note = 2'-O-methylguanosine-3'-phosphorothioate
  modified_base 3: mod_base = OTHER; note = 2'-O-methyladenosine-3'-phosphate
  modified_base 4: mod_base = OTHER; note = 2'-O-methylguanosine-3'-phosphate
  modified_base 5: mod_base = OTHER; note = 2'-O-methyladenosine-3'-phosphate
  modified_base 6: mod_base = OTHER; note = 2'-O-methylcytidine-3'-phosphate
  modified_base 7: mod_base = OTHER; note = 2'-O-methylcytidine-3'-phosphate
  modified_base 8: mod_base = OTHER; note = 2'-O-methyladenosine-3'-phosphate
  modified_base 9: mod_base = OTHER; note = 2'-fluoroadenosine-3'-phosphate
  modified_base 10: mod_base = OTHER; note = 2'-fluoroguanosine-3'-phosphate
  modified_base 11: mod_base = OTHER; note = 2'-fluoroadenosine-3'-phosphate
  modified_base 12: mod_base = OTHER; note = 2'-O-methyluridine-3'-phosphate
  modified_base 13: mod_base = OTHER; note = 2'-O-methylguanosine-3'-phosphate
  modified_base 14: mod_base = OTHER; note = 2'-O-methyladenosine-3'-phosphate
  modified_base 15: mod_base = OTHER; note = 2'-O-methyladenosine-3'-phosphate
  modified_base 16: mod_base = OTHER; note = 2'-O-methylguanosine-3'-phosphate
  modified_base 17: mod_base = OTHER; note = 2'-O-methyluridine-3'-phosphate
  modified_base 18: mod_base = OTHER; note = 2'-O-methyluridine-3'-phosphate
  modified_base 19: mod_base = OTHER; note = 2'-O-methyluridine-3'-phosphate
  modified_base 20: mod_base = OTHER; note = 2'-O-methylcytidine-3'-phosphate
  modified_base 21: mod_base = OTHER; note = 2'-O-methyluridine-3'-phosphate N-[tris(GalNAc-alkyl)-amidodecanoyl)]-4-hydroxyprolinol (Hyp-(GalNAc-alkyl)3)
agagaccaagatgaagtttct

SEQ ID NO: 6960 - RNA, 21 nt, synthetic construct
  source 1..21: mol_type = other RNA
  modified_base 1: mod_base = OTHER; note = 2'-O-methylguanosine-3'-phosphorothioate
  modified_base 2: mod_base = OTHER; note = 2'-O-methyladenosine-3'-phosphorothioate
  modified_base 3: mod_base = OTHER; note = 2'-O-methylguanosine-3'-phosphate
  modified_base 4: mod_base = OTHER; note = 2'-O-methyladenosine-3'-phosphate
  modified_base 5: mod_base = OTHER; note = 2'-O-methylcytidine-3'-phosphate
  modified_base 6: mod_base = OTHER; note = 2'-O-methylcytidine-3'-phosphate
  modified_base 7: mod_base = OTHER; note = 2'-O-methyladenosine-3'-phosphate
  modified_base 8: mod_base = OTHER; note = 2'-O-methyladenosine-3'-phosphate
  modified_base 9: mod_base = OTHER; note = 2'-fluoroguanosine-3'-phosphate
  modified_base 10: mod_base = OTHER; note = 2'-fluoroadenosine-3'-phosphate
  modified_base 11: mod_base = OTHER; note = 2'-fluorouridine-3'-phosphate
  modified_base 12: mod_base = OTHER; note = 2'-O-methylguanosine-3'-phosphate
  modified_base 13: mod_base = OTHER; note = 2'-O-methyladenosine-3'-phosphate
  modified_base 14: mod_base = OTHER; note = 2'-O-methyladenosine-3'-phosphate
  modified_base 15: mod_base = OTHER; note = 2'-O-methylguanosine-3'-phosphate
  modified_base 16: mod_base = OTHER; note = 2'-O-methyluridine-3'-phosphate
  modified_base 17: mod_base = OTHER; note = 2'-O-methyluridine-3'-phosphate
  modified_base 18: mod_base = OTHER; note = 2'-O-methyluridine-3'-phosphate
  modified_base 19: mod_base = OTHER; note = 2'-O-methylcytidine-3'-phosphate
  modified_base 20: mod_base = OTHER; note = 2'-O-methylcytidine-3'-phosphate
  modified_base 21: mod_base = OTHER; note = 2'-O-methyluridine-3'-phosphate N-[tris(GalNAc-alkyl)-amidodecanoyl)]-4-hydroxyprolinol (Hyp-(GalNAc-alkyl)3)
gagaccaagatgaagtttcct

SEQ ID NO: 6961 - RNA, 21 nt, synthetic construct
  source 1..21: mol_type = other RNA
  modified_base 1: mod_base = OTHER; note = 2'-O-methyladenosine-3'-phosphorothioate
  modified_base 2: mod_base = OTHER; note = 2'-O-methylguanosine-3'-phosphorothioate
  modified_base 3: mod_base = OTHER; note = 2'-O-methyladenosine-3'-phosphate
  modified_base 4: mod_base = OTHER; note = 2'-O-methylcytidine-3'-phosphate
  modified_base 5: mod_base = OTHER; note = 2'-O-methylcytidine-3'-phosphate
  modified_base 6: mod_base = OTHER; note = 2'-O-methyladenosine-3'-phosphate
  modified_base 7: mod_base = OTHER; note = 2'-O-methyladenosine-3'-phosphate
  modified_base 8: mod_base = OTHER; note = 2'-O-methylguanosine-3'-phosphate
  modified_base 9: mod_base = OTHER; note = 2'-fluoroadenosine-3'-phosphate
  modified_base 10: mod_base = OTHER; note = 2'-fluorouridine-3'-phosphate
  modified_base 11: mod_base = OTHER; note = 2'-fluoroguanosine-3'-phosphate
  modified_base 12: mod_base = OTHER; note = 2'-O-methyladenosine-3'-phosphate
  modified_base 13: mod_base = OTHER; note = 2'-O-methyladenosine-3'-phosphate
  modified_base 14: mod_base = OTHER; note = 2'-O-methylguanosine-3'-phosphate
  modified_base 15: mod_base = OTHER; note = 2'-O-methyluridine-3'-phosphate
  modified_base 16: mod_base = OTHER; note = 2'-O-methyluridine-3'-phosphate
  modified_base 17: mod_base = OTHER; note = 2'-O-methyluridine-3'-phosphate
  modified_base 18: mod_base = OTHER; note = 2'-O-methylcytidine-3'-phosphate
  modified_base 19: mod_base = OTHER; note = 2'-O-methylcytidine-3'-phosphate
  modified_base 20: mod_base = OTHER; note = 2'-O-methylcytidine-3'-phosphate
  modified_base 21: mod_base = OTHER; note = 2'-O-methyluridine-3'-phosphate N-[tris(GalNAc-alkyl)-amidodecanoyl)]-4-hydroxyprolinol (Hyp-(GalNAc-alkyl)3)
agaccaagatgaagtttccct

SEQ ID NO: 6962 - RNA, 21 nt, synthetic construct
  source 1..21: mol_type = other RNA
  modified_base 1: mod_base = OTHER; note = 2'-O-methylguanosine-3'-phosphorothioate
  modified_base 2: mod_base = OTHER; note = 2'-O-methyladenosine-3'-phosphorothioate
  modified_base 3: mod_base = OTHER; note = 2'-O-methylcytidine-3'-phosphate
  modified_base 4: mod_base = OTHER; note = 2'-O-methylcytidine-3'-phosphate
  modified_base 5: mod_base = OTHER; note = 2'-O-methyladenosine-3'-phosphate
  modified_base 6: mod_base = OTHER; note = 2'-O-methyladenosine-3'-phosphate
  modified_base 7: mod_base = OTHER; note = 2'-O-methylguanosine-3'-phosphate
  modified_base 8: mod_base = OTHER; note = 2'-O-methyladenosine-3'-phosphate
  modified_base 9: mod_base = OTHER; note = 2'-fluorouridine-3'-phosphate
  modified_base 10: mod_base = OTHER; note = 2'-fluoroguanosine-3'-phosphate
  modified_base 11: mod_base = OTHER; note = 2'-fluoroadenosine-3'-phosphate
  modified_base 12: mod_base = OTHER; note = 2'-O-methyladenosine-3'-phosphate
  modified_base 13: mod_base = OTHER; note = 2'-O-methylguanosine-3'-phosphate
  modified_base 14: mod_base = OTHER; note = 2'-O-methyluridine-3'-phosphate
  modified_base 15: mod_base = OTHER; note = 2'-O-methyluridine-3'-phosphate
  modified_base 16: mod_base = OTHER; note = 2'-O-methyluridine-3'-phosphate
  modified_base 17: mod_base = OTHER; note = 2'-O-methylcytidine-3'-phosphate
  modified_base 18: mod_base = OTHER; note = 2'-O-methylcytidine-3'-phosphate
  modified_base 19: mod_base = OTHER; note = 2'-O-methylcytidine-3'-phosphate
  modified_base 20: mod_base = OTHER; note = 2'-O-methyladenosine-3'-phosphate
  modified_base 21: mod_base = OTHER; note = 2'-O-methyluridine-3'-phosphate N-[tris(GalNAc-alkyl)-amidodecanoyl)]-4-hydroxyprolinol (Hyp-(GalNAc-alkyl)3)
gaccaagatgaagtttcccat

SEQ ID NO: 6963 - RNA, 21 nt, synthetic construct
  source 1..21: mol_type = other RNA
  modified_base 1: mod_base = OTHER; note = 2'-O-methyladenosine-3'-phosphorothioate
  modified_base 2: mod_base = OTHER; note = 2'-O-methylcytidine-3'-phosphorothioate
  modified_base 3: mod_base = OTHER; note = 2'-O-methylcytidine-3'-phosphate
  modified_base 4: mod_base = OTHER; note = 2'-O-methyladenosine-3'-phosphate
  modified_base 5: mod_base = OTHER; note = 2'-O-methyladenosine-3'-phosphate
  modified_base 6: mod_base = OTHER; note = 2'-O-methylguanosine-3'-phosphate
  modified_base 7: mod_base = OTHER; note = 2'-O-methyladenosine-3'-phosphate
  modified_base 8: mod_base = OTHER; note = 2'-O-methyluridine-3'-phosphate
  modified_base 9: mod_base = OTHER; note = 2'-fluoroguanosine-3'-phosphate
  modified_base 10: mod_base = OTHER; note = 2'-fluoroadenosine-3'-phosphate
  modified_base 11: mod_base = OTHER; note = 2'-fluoroadenosine-3'-phosphate
  modified_base 12: mod_base = OTHER; note = 2'-O-methylguanosine-3'-phosphate
  modified_base 13: mod_base = OTHER; note = 2'-O-methyluridine-3'-phosphate
  modified_base 14: mod_base = OTHER; note = 2'-O-methyluridine-3'-phosphate
  modified_base 15: mod_base = OTHER; note = 2'-O-methyluridine-3'-phosphate
  modified_base 16: mod_base = OTHER; note = 2'-O-methylcytidine-3'-phosphate
  modified_base 17: mod_base = OTHER; note = 2'-O-methylcytidine-3'-phosphate
  modified_base 18: mod_base = OTHER; note = 2'-O-methylcytidine-3'-phosphate
  modified_base 19: mod_base = OTHER; note = 2'-O-methyladenosine-3'-phosphate
  modified_base 20: mod_base = OTHER; note = 2'-O-methylguanosine-3'-phosphate
  modified_base 21: mod_base = OTHER; note = 2'-O-methyluridine-3'-phosphate N-[tris(GalNAc-alkyl)-amidodecanoyl)]-4-hydroxyprolinol (Hyp-(GalNAc-alkyl)3)
accaagatgaagtttcccagt

SEQ ID NO: 6964 - RNA, 21 nt, synthetic construct
  source 1..21: mol_type = other RNA
  modified_base 1: mod_base = OTHER; note = 2'-O-methylcytidine-3'-phosphorothioate
  modified_base 2: mod_base = OTHER; note = 2'-O-methylcytidine-3'-phosphorothioate
  modified_base 3: mod_base = OTHER; note = 2'-O-methyladenosine-3'-phosphate
  modified_base 4: mod_base = OTHER; note = 2'-O-methyladenosine-3'-phosphate
  modified_base 5: mod_base = OTHER; note = 2'-O-methylguanosine-3'-phosphate
  modified_base 6: mod_base = OTHER; note = 2'-O-methyladenosine-3'-phosphate
  modified_base 7: mod_base = OTHER; note = 2'-O-methyluridine-3'-phosphate
  modified_base 8: mod_base = OTHER; note = 2'-O-methylguanosine-3'-phosphate
  modified_base 9: mod_base = OTHER; note = 2'-fluoroadenosine-3'-phosphate
  modified_base 10: mod_base = OTHER; note = 2'-fluoroadenosine-3'-phosphate
  modified_base 11: mod_base = OTHER; note = 2'-fluoroguanosine-3'-phosphate
  modified_base 12: mod_base = OTHER; note = 2'-O-methyluridine-3'-phosphate
  modified_base 13: mod_base = OTHER; note = 2'-O-methyluridine-3'-phosphate
  modified_base 14: mod_base = OTHER; note = 2'-O-methyluridine-3'-phosphate
  modified_base 15: mod_base = OTHER; note = 2'-O-methylcytidine-3'-phosphate
  modified_base 16: mod_base = OTHER; note = 2'-O-methylcytidine-3'-phosphate
  modified_base 17: mod_base = OTHER; note = 2'-O-methylcytidine-3'-phosphate
  modified_base 18: mod_base = OTHER; note = 2'-O-methyladenosine-3'-phosphate
  modified_base 19: mod_base = OTHER; note = 2'-O-methylguanosine-3'-phosphate
  modified_base 20: mod_base = OTHER; note = 2'-O-methylguanosine-3'-phosphate
  modified_base 21: mod_base = OTHER; note = 2'-O-methyluridine-3'-phosphate N-[tris(GalNAc-alkyl)-amidodecanoyl)]-4-hydroxyprolinol (Hyp-(GalNAc-alkyl)3)
ccaagatgaagtttcccaggt

SEQ ID NO: 6965 - RNA, 21 nt, synthetic construct
  source 1..21: mol_type = other RNA
  modified_base 1: mod_base = OTHER; note = 2'-O-methylcytidine-3'-phosphorothioate
  modified_base 2: mod_base = OTHER; note = 2'-O-methyladenosine-3'-phosphorothioate
  modified_base 3: mod_base = OTHER; note = 2'-O-methyladenosine-3'-phosphate
  modified_base 4: mod_base = OTHER; note = 2'-O-methylguanosine-3'-phosphate
  modified_base 5: mod_base = OTHER; note = 2'-O-methyladenosine-3'-phosphate
  modified_base 6: mod_base = OTHER; note = 2'-O-methyluridine-3'-phosphate
  modified_base 7: mod_base = OTHER; note = 2'-O-methylguanosine-3'-phosphate
  modified_base 8: mod_base = OTHER; note = 2'-O-methyladenosine-3'-phosphate
  modified_base 9: mod_base = OTHER; note = 2'-fluoroadenosine-3'-phosphate
  modified_base 10: mod_base = OTHER; note = 2'-fluoroguanosine-3'-phosphate
  modified_base 11: mod_base = OTHER; note = 2'-fluorouridine-3'-phosphate
  modified_base 12: mod_base = OTHER; note = 2'-O-methyluridine-3'-phosphate
  modified_base 13: mod_base = OTHER; note = 2'-O-methyluridine-3'-phosphate
  modified_base 14: mod_base = OTHER; note = 2'-O-methylcytidine-3'-phosphate
  modified_base 15: mod_base = OTHER; note = 2'-O-methylcytidine-3'-phosphate
  modified_base 16: mod_base = OTHER; note = 2'-O-methylcytidine-3'-phosphate
  modified_base 17: mod_base = OTHER; note = 2'-O-methyladenosine-3'-phosphate
  modified_base 18: mod_base = OTHER; note = 2'-O-methylguanosine-3'-phosphate
  modified_base 19: mod_base = OTHER; note = 2'-O-methylguanosine-3'-phosphate
  modified_base 20: mod_base = OTHER; note = 2'-O-methylcytidine-3'-phosphate
  modified_base 21: mod_base = OTHER; note = 2'-O-methyluridine-3'-phosphate N-[tris(GalNAc-alkyl)-amidodecanoyl)]-4-hydroxyprolinol (Hyp-(GalNAc-alkyl)3)
caagatgaagtttcccaggct

SEQ ID NO: 6966 - RNA, 21 nt, synthetic construct
  source 1..21: mol_type = other RNA
  modified_base 1: mod_base = OTHER; note = 2'-O-methyladenosine-3'-phosphorothioate
  modified_base 2: mod_base = OTHER; note = 2'-O-methyladenosine-3'-phosphorothioate
  modified_base 3: mod_base = OTHER; note = 2'-O-methylguanosine-3'-phosphate
  modified_base 4: mod_base = OTHER; note = 2'-O-methyladenosine-3'-phosphate
  modified_base 5: mod_base = OTHER; note = 2'-O-methyluridine-3'-phosphate
  modified_base 6: mod_base = OTHER; note = 2'-O-methylguanosine-3'-phosphate
  modified_base 7: mod_base = OTHER; note = 2'-O-methyladenosine-3'-phosphate
  modified_base 8: mod_base = OTHER; note = 2'-O-methyladenosine-3'-phosphate
  modified_base 9: mod_base = OTHER; note = 2'-fluoroguanosine-3'-phosphate
  modified_base 10: mod_base = OTHER; note = 2'-fluorouridine-3'-phosphate
  modified_base 11: mod_base = OTHER; note = 2'-fluorouridine-3'-phosphate
  modified_base 12: mod_base = OTHER; note = 2'-O-methyluridine-3'-phosphate
  modified_base 13: mod_base = OTHER; note = 2'-O-methylcytidine-3'-phosphate
  modified_base 14: mod_base = OTHER; note = 2'-O-methylcytidine-3'-phosphate
  modified_base 15: mod_base = OTHER; note = 2'-O-methylcytidine-3'-phosphate
  modified_base 16: mod_base = OTHER; note = 2'-O-methyladenosine-3'-phosphate
  modified_base 17: mod_base = OTHER; note = 2'-O-methylguanosine-3'-phosphate
  modified_base 18: mod_base = OTHER; note = 2'-O-methylguanosine-3'-phosphate
  modified_base 19: mod_base = OTHER; note = 2'-O-methylcytidine-3'-phosphate
  modified_base 20: mod_base = OTHER; note = 2'-O-methyladenosine-3'-phosphate
  modified_base 21: mod_base = OTHER; note = 2'-O-methyluridine-3'-phosphate N-[tris(GalNAc-alkyl)-amidodecanoyl)]-4-hydroxyprolinol (Hyp-(GalNAc-alkyl)3)
aagatgaagtttcccaggcat

SEQ ID NO: 6967 - RNA, 21 nt, synthetic construct
  source 1..21: mol_type = other RNA
  modified_base 1: mod_base = OTHER; note = 2'-O-methyladenosine-3'-phosphorothioate
  modified_base 2: mod_base = OTHER; note = 2'-O-methylguanosine-3'-phosphorothioate
  modified_base 3: mod_base = OTHER; note = 2'-O-methyladenosine-3'-phosphate
  modified_base 4: mod_base = OTHER; note = 2'-O-methyluridine-3'-phosphate
  modified_base 5: mod_base = OTHER; note = 2'-O-methylguanosine-3'-phosphate
  modified_base 6: mod_base = OTHER; note = 2'-O-methyladenosine-3'-phosphate
  modified_base 7: mod_base = OTHER; note = 2'-O-methyladenosine-3'-phosphate
  modified_base 8: mod_base = OTHER; note = 2'-O-methylguanosine-3'-phosphate
  modified_base 9: mod_base = OTHER; note = 2'-fluorouridine-3'-phosphate
  modified_base 10: mod_base = OTHER; note = 2'-fluorouridine-3'-phosphate
  modified_base 11: mod_base = OTHER; note = 2'-fluorouridine-3'-phosphate
  modified_base 12: mod_base = OTHER; note = 2'-O-methylcytidine-3'-phosphate
  modified_base 13: mod_base = OTHER; note = 2'-O-methylcytidine-3'-phosphate
  modified_base 14: mod_base = OTHER; note = 2'-O-methylcytidine-3'-phosphate
  modified_base 15: mod_base = OTHER; note = 2'-O-methyladenosine-3'-phosphate
  modified_base 16: mod_base = OTHER; note = 2'-O-methylguanosine-3'-phosphate
  modified_base 17: mod_base = OTHER; note = 2'-O-methylguanosine-3'-phosphate
  modified_base 18: mod_base = OTHER; note = 2'-O-methylcytidine-3'-phosphate
  modified_base 19: mod_base = OTHER; note = 2'-O-methyladenosine-3'-phosphate
  modified_base 20: mod_base = OTHER; note = 2'-O-methylcytidine-3'-phosphate
  modified_base 21: mod_base = OTHER; note = 2'-O-methyluridine-3'-phosphate N-[tris(GalNAc-alkyl)-amidodecanoyl)]-4-hydroxyprolinol (Hyp-(GalNAc-alkyl)3)
agatgaagtttcccaggcact

SEQ ID NO: 6968 - RNA, 21 nt, synthetic construct
  source 1..21: mol_type = other RNA
  modified_base 1: mod_base = OTHER; note = 2'-O-methylguanosine-3'-phosphorothioate
  modified_base 2: mod_base = OTHER; note = 2'-O-methyladenosine-3'-phosphorothioate
  modified_base 3: mod_base = OTHER; note = 2'-O-methyluridine-3'-phosphate
  modified_base 4: mod_base = OTHER; note = 2'-O-methylguanosine-3'-phosphate
  modified_base 5: mod_base = OTHER; note = 2'-O-methyladenosine-3'-phosphate
  modified_base 6: mod_base = OTHER; note = 2'-O-methyladenosine-3'-phosphate
  modified_base 7: mod_base = OTHER; note = 2'-O-methylguanosine-3'-phosphate
  modified_base 8: mod_base = OTHER; note = 2'-O-methyluridine-3'-phosphate
  modified_base 9: mod_base = OTHER; note = 2'-fluorouridine-3'-phosphate
  modified_base 10: mod_base = OTHER; note = 2'-fluorouridine-3'-phosphate
  modified_base 11: mod_base = OTHER; note = 2'-fluorocytidine-3'-phosphate
  modified_base 12: mod_base = OTHER; note = 2'-O-methylcytidine-3'-phosphate
  modified_base 13: mod_base = OTHER; note = 2'-O-methylcytidine-3'-phosphate
  modified_base 14: mod_base = OTHER; note = 2'-O-methyladenosine-3'-phosphate
  modified_base 15: mod_base = OTHER; note = 2'-O-methylguanosine-3'-phosphate
  modified_base 16: mod_base = OTHER; note = 2'-O-methylguanosine-3'-phosphate
  modified_base 17: mod_base = OTHER; note = 2'-O-methylcytidine-3'-phosphate
  modified_base 18: mod_base = OTHER; note = 2'-O-methyladenosine-3'-phosphate
  modified_base 19: mod_base = OTHER; note = 2'-O-methylcytidine-3'-phosphate
  modified_base 20: mod_base = OTHER; note = 2'-O-methyladenosine-3'-phosphate
  modified_base 21: mod_base = OTHER; note = 2'-O-methyluridine-3'-phosphate N-[tris(GalNAc-alkyl)-amidodecanoyl)]-4-hydroxyprolinol (Hyp-(GalNAc-alkyl)3)
gatgaagtttcccaggcacat

SEQ ID NO: 6969 - RNA, 21 nt, synthetic construct
  source 1..21: mol_type = other RNA
  modified_base 1: mod_base = OTHER; note = 2'-O-methyladenosine-3'-phosphorothioate
  modified_base 2: mod_base = OTHER; note = 2'-O-methyluridine-3'-phosphorothioate
  modified_base 3: mod_base = OTHER; note = 2'-O-methylguanosine-3'-phosphate
  modified_base 4: mod_base = OTHER; note = 2'-O-methyladenosine-3'-phosphate
  modified_base 5: mod_base = OTHER; note = 2'-O-methyladenosine-3'-phosphate
  modified_base 6: mod_base = OTHER; note = 2'-O-methylguanosine-3'-phosphate
  modified_base 7: mod_base = OTHER; note = 2'-O-methyluridine-3'-phosphate
  modified_base 8: mod_base = OTHER; note = 2'-O-methyluridine-3'-phosphate
  modified_base 9: mod_base = OTHER; note = 2'-fluorouridine-3'-phosphate
  modified_base 10: mod_base = OTHER; note = 2'-fluorocytidine-3'-phosphate
  modified_base 11: mod_base = OTHER; note = 2'-fluorocytidine-3'-phosphate
  modified_base 12: mod_base = OTHER; note = 2'-O-methylcytidine-3'-phosphate
  modified_base 13: mod_base = OTHER; note = 2'-O-methyladenosine-3'-phosphate
  modified_base 14: mod_base = OTHER; note = 2'-O-methylguanosine-3'-phosphate
  modified_base 15: mod_base = OTHER; note = 2'-O-methylguanosine-3'-phosphate
  modified_base 16: mod_base = OTHER; note = 2'-O-methylcytidine-3'-phosphate
  modified_base 17: mod_base = OTHER; note = 2'-O-methyladenosine-3'-phosphate
  modified_base 18: mod_base = OTHER; note = 2'-O-methylcytidine-3'-phosphate
  modified_base 19: mod_base = OTHER; note = 2'-O-methyladenosine-3'-phosphate
  modified_base 20: mod_base = OTHER; note = 2'-O-methylguanosine-3'-phosphate
  modified_base 21: mod_base = OTHER; note = 2'-O-methyluridine-3'-phosphate N-[tris(GalNAc-alkyl)-amidodecanoyl)]-4-hydroxyprolinol (Hyp-(GalNAc-alkyl)3)
atgaagtttcccaggcacagt

SEQ ID NO: 6970 - RNA, 21 nt, synthetic construct
  source 1..21: mol_type = other RNA
  modified_base 1: mod_base = OTHER; note = 2'-O-methylguanosine-3'-phosphorothioate
  modified_base 2: mod_base = OTHER; note = 2'-O-methyladenosine-3'-phosphorothioate
  modified_base 3: mod_base = OTHER; note = 2'-O-methyladenosine-3'-phosphate
  modified_base 4: mod_base = OTHER; note = 2'-O-methylguanosine-3'-phosphate
  modified_base 5: mod_base = OTHER; note = 2'-O-methyluridine-3'-phosphate
  modified_base 6: mod_base = OTHER; note = 2'-O-methyluridine-3'-phosphate
  modified_base 7: mod_base = OTHER; note = 2'-O-methyluridine-3'-phosphate
  modified_base 8: mod_base = OTHER; note = 2'-O-methylcytidine-3'-phosphate
  modified_base 9: mod_base = OTHER; note = 2'-fluorocytidine-3'-phosphate
  modified_base 10: mod_base = OTHER; note = 2'-fluorocytidine-3'-phosphate
  modified_base 11: mod_base = OTHER; note = 2'-fluoroadenosine-3'-phosphate
  modified_base 12: mod_base = OTHER; note = 2'-O-methylguanosine-3'-phosphate
  modified_base 13: mod_base = OTHER; note = 2'-O-methylguanosine-3'-phosphate
  modified_base 14: mod_base = OTHER; note = 2'-O-methylcytidine-3'-phosphate
  modified_base 15: mod_base = OTHER; note = 2'-O-methyladenosine-3'-phosphate
  modified_base 16: mod_base = OTHER; note = 2'-O-methylcytidine-3'-phosphate
  modified_base 17: mod_base = OTHER; note = 2'-O-methyladenosine-3'-phosphate
  modified_base 18: mod_base = OTHER; note = 2'-O-methylguanosine-3'-phosphate
  modified_base 19: mod_base = OTHER; note = 2'-O-methylguanosine-3'-phosphate
  modified_base 20: mod_base = OTHER; note = 2'-O-methylguanosine-3'-phosphate
  modified_base 21: mod_base = OTHER; note = 2'-O-methyluridine-3'-phosphate N-[tris(GalNAc-alkyl)-amidodecanoyl)]-4-hydroxyprolinol (Hyp-(GalNAc-alkyl)3)
gaagtttcccaggcacagggt

SEQ ID NO: 6971 - RNA, 21 nt, synthetic construct
  source 1..21: mol_type = other RNA
  modified_base 1: mod_base = OTHER; note = 2'-O-methyladenosine-3'-phosphorothioate
  modified_base 2: mod_base = OTHER; note = 2'-O-methyladenosine-3'-phosphorothioate
  modified_base 3: mod_base = OTHER; note = 2'-O-methylguanosine-3'-phosphate
  modified_base 4: mod_base = OTHER; note = 2'-O-methyluridine-3'-phosphate
  modified_base 5: mod_base = OTHER; note = 2'-O-methyluridine-3'-phosphate
  modified_base 6: mod_base = OTHER; note = 2'-O-methyluridine-3'-phosphate
  modified_base 7: mod_base = OTHER; note = 2'-O-methylcytidine-3'-phosphate
  modified_base 8: mod_base = OTHER; note = 2'-O-methylcytidine-3'-phosphate
  modified_base 9: mod_base = OTHER; note = 2'-fluorocytidine-3'-phosphate
  modified_base 10: mod_base = OTHER; note = 2'-fluoroadenosine-3'-phosphate
  modified_base 11: mod_base = OTHER; note = 2'-fluoroguanosine-3'-phosphate
  modified_base 12: mod_base = OTHER; note = 2'-O-methylguanosine-3'-phosphate
  modified_base 13: mod_base = OTHER; note = 2'-O-methylcytidine-3'-phosphate
  modified_base 14: mod_base = OTHER; note = 2'-O-methyladenosine-3'-phosphate
  modified_base 15: mod_base = OTHER; note = 2'-O-methylcytidine-3'-phosphate
  modified_base 16: mod_base = OTHER; note = 2'-O-methyladenosine-3'-phosphate
  modified_base 17: mod_base = OTHER; note = 2'-O-methylguanosine-3'-phosphate
  modified_base 18: mod_base = OTHER; note = 2'-O-methylguanosine-3'-phosphate
  modified_base 19: mod_base = OTHER; note = 2'-O-methylguanosine-3'-phosphate
  modified_base 20: mod_base = OTHER; note = 2'-O-methylcytidine-3'-phosphate
  modified_base 21: mod_base = OTHER; note = 2'-O-methyluridine-3'-phosphate N-[tris(GalNAc-alkyl)-amidodecanoyl)]-4-hydroxyprolinol (Hyp-(GalNAc-alkyl)3)
aagtttcccaggcacagggct

SEQ ID NO: 6972 - RNA, 21 nt, synthetic construct
  source 1..21: mol_type = other RNA
  modified_base 1: mod_base = OTHER; note = 2'-O-methylguanosine-3'-phosphorothioate
  modified_base 2: mod_base = OTHER; note = 2'-O-methyluridine-3'-phosphorothioate
  modified_base 3: mod_base = OTHER; note = 2'-O-methyluridine-3'-phosphate
  modified_base 4: mod_base = OTHER; note = 2'-O-methyluridine-3'-phosphate
  modified_base 5: mod_base = OTHER; note = 2'-O-methylcytidine-3'-phosphate
  modified_base 6: mod_base = OTHER; note = 2'-O-methylcytidine-3'-phosphate
  modified_base 7: mod_base = OTHER; note = 2'-O-methylcytidine-3'-phosphate
  modified_base 8: mod_base = OTHER; note = 2'-O-methyladenosine-3'-phosphate
  modified_base 9: mod_base = OTHER; note = 2'-fluoroguanosine-3'-phosphate
  modified_base 10: mod_base = OTHER; note = 2'-fluoroguanosine-3'-phosphate
  modified_base 11: mod_base = OTHER; note = 2'-fluorocytidine-3'-phosphate
  modified_base 12: mod_base = OTHER; note = 2'-O-methyladenosine-3'-phosphate
  modified_base 13: mod_base = OTHER; note = 2'-O-methylcytidine-3'-phosphate
  modified_base 14: mod_base = OTHER; note = 2'-O-methyladenosine-3'-phosphate
  modified_base 15: mod_base = OTHER; note = 2'-O-methylguanosine-3'-phosphate
  modified_base 16: mod_base = OTHER; note = 2'-O-methylguanosine-3'-phosphate
  modified_base 17: mod_base = OTHER; note = 2'-O-methylguanosine-3'-phosphate
  modified_base 18: mod_base = OTHER; note = 2'-O-methylcytidine-3'-phosphate
  modified_base 19: mod_base = OTHER; note = 2'-O-methyladenosine-3'-phosphate
  modified_base 20: mod_base = OTHER; note = 2'-O-methyluridine-3'-phosphate
  modified_base 21: mod_base = OTHER; note = 2'-O-methyluridine-3'-phosphate N-[tris(GalNAc-alkyl)-amidodecanoyl)]-4-hydroxyprolinol (Hyp-(GalNAc-alkyl)3)
gtttcccaggcacagggcatt

SEQ ID NO: 6973 - RNA, 21 nt, synthetic construct
  source 1..21: mol_type = other RNA
  modified_base 1: mod_base = OTHER; note = 2'-O-methyluridine-3'-phosphorothioate
  modified_base 2: mod_base = OTHER; note = 2'-O-methyluridine-3'-phosphorothioate
  modified_base 3: mod_base = OTHER; note = 2'-O-methyluridine-3'-phosphate
  modified_base 4: mod_base = OTHER; note = 2'-O-methylcytidine-3'-phosphate
  modified_base 5: mod_base = OTHER; note = 2'-O-methylcytidine-3'-phosphate
  modified_base 6: mod_base = OTHER; note = 2'-O-methylcytidine-3'-phosphate
  modified_base 7: mod_base = OTHER; note = 2'-O-methyladenosine-3'-phosphate
  modified_base 8: mod_base = OTHER; note = 2'-O-methylguanosine-3'-phosphate
  modified_base 9: mod_base = OTHER; note = 2'-fluoroguanosine-3'-phosphate
  modified_base 10: mod_base = OTHER; note = 2'-fluorocytidine-3'-phosphate
  modified_base 11: mod_base = OTHER; note = 2'-fluoroadenosine-3'-phosphate
  modified_base 12: mod_base = OTHER; note = 2'-O-methylcytidine-3'-phosphate
  modified_base 13: mod_base = OTHER; note = 2'-O-methyladenosine-3'-phosphate
  modified_base 14: mod_base = OTHER; note = 2'-O-methylguanosine-3'-phosphate
  modified_base 15: mod_base = OTHER; note = 2'-O-methylguanosine-3'-phosphate
  modified_base 16: mod_base = OTHER; note = 2'-O-methylguanosine-3'-phosphate
  modified_base 17: mod_base = OTHER; note = 2'-O-methylcytidine-3'-phosphate
  modified_base 18: mod_base = OTHER; note = 2'-O-methyladenosine-3'-phosphate
  modified_base 19: mod_base = OTHER; note = 2'-O-methyluridine-3'-phosphate
  modified_base 20: mod_base = OTHER; note = 2'-O-methylcytidine-3'-phosphate
  modified_base 21: mod_base = OTHER; note = 2'-O-methyluridine-3'-phosphate N-[tris(GalNAc-alkyl)-amidodecanoyl)]-4-hydroxyprolinol (Hyp-(GalNAc-alkyl)3)
tttcccaggcacagggcatct

SEQ ID NO: 6974 - RNA, 21 nt, synthetic construct
  source 1..21: mol_type = other RNA
  modified_base 1: mod_base = OTHER; note = 2'-O-methyluridine-3'-phosphorothioate
  modified_base 2: mod_base = OTHER; note = 2'-O-methyluridine-3'-phosphorothioate
  modified_base 3: mod_base = OTHER; note = 2'-O-methylcytidine-3'-phosphate
  modified_base 4: mod_base = OTHER; note = 2'-O-methylcytidine-3'-phosphate
  modified_base 5: mod_base = OTHER; note = 2'-O-methylcytidine-3'-phosphate
  modified_base 6: mod_base = OTHER; note = 2'-O-methyladenosine-3'-phosphate
  modified_base 7: mod_base = OTHER; note = 2'-O-methylguanosine-3'-phosphate
  modified_base 8: mod_base = OTHER; note = 2'-O-methylguanosine-3'-phosphate
  modified_base 9: mod_base = OTHER; note = 2'-fluorocytidine-3'-phosphate
  modified_base 10: mod_base = OTHER; note = 2'-fluoroadenosine-3'-phosphate
  modified_base 11: mod_base = OTHER; note = 2'-fluorocytidine-3'-phosphate
  modified_base 12: mod_base = OTHER; note = 2'-O-methyladenosine-3'-phosphate
  modified_base 13: mod_base = OTHER; note = 2'-O-methylguanosine-3'-phosphate
  modified_base 14: mod_base = OTHER; note = 2'-O-methylguanosine-3'-phosphate
  modified_base 15: mod_base = OTHER; note = 2'-O-methylguanosine-3'-phosphate
  modified_base 16: mod_base = OTHER; note = 2'-O-methylcytidine-3'-phosphate
  modified_base 17: mod_base = OTHER; note = 2'-O-methyladenosine-3'-phosphate
  modified_base 18: mod_base = OTHER; note = 2'-O-methyluridine-3'-phosphate
  modified_base 19: mod_base = OTHER; note = 2'-O-methylcytidine-3'-phosphate
  modified_base 20: mod_base = OTHER; note = 2'-O-methyluridine-3'-phosphate
  modified_base 21: mod_base = OTHER; note = 2'-O-methyluridine-3'-phosphate N-[tris(GalNAc-alkyl)-amidodecanoyl)]-4-hydroxyprolinol (Hyp-(GalNAc-alkyl)3)
ttcccaggcacagggcatctt

SEQ ID NO: 6975 - RNA, 21 nt, synthetic construct
  source 1..21: mol_type = other RNA
  modified_base 1: mod_base = OTHER; note = 2'-O-methyluridine-3'-phosphorothioate
  modified_base 2: mod_base = OTHER; note = 2'-O-methylcytidine-3'-phosphorothioate
  modified_base 3: mod_base = OTHER; note = 2'-O-methylcytidine-3'-phosphate
  modified_base 4: mod_base = OTHER; note = 2'-O-methylcytidine-3'-phosphate
  modified_base 5: mod_base = OTHER; note = 2'-O-methyladenosine-3'-phosphate
  modified_base 6: mod_base = OTHER; note = 2'-O-methylguanosine-3'-phosphate
  modified_base 7: mod_base = OTHER; note = 2'-O-methylguanosine-3'-phosphate
  modified_base 8: mod_base = OTHER; note = 2'-O-methylcytidine-3'-phosphate
  modified_base 9: mod_base = OTHER; note = 2'-fluoroadenosine-3'-phosphate
  modified_base 10: mod_base = OTHER; note = 2'-fluorocytidine-3'-phosphate
  modified_base 11: mod_base = OTHER; note = 2'-fluoroadenosine-3'-phosphate
  modified_base 12: mod_base = OTHER; note = 2'-O-methylguanosine-3'-phosphate
  modified_base 13: mod_base = OTHER; note = 2'-O-methylguanosine-3'-phosphate
  modified_base 14: mod_base = OTHER; note = 2'-O-methylguanosine-3'-phosphate
  modified_base 15: mod_base = OTHER; note = 2'-O-methylcytidine-3'-phosphate
  modified_base 16: mod_base = OTHER; note = 2'-O-methyladenosine-3'-phosphate
  modified_base 17: mod_base = OTHER; note = 2'-O-methyluridine-3'-phosphate
  modified_base 18: mod_base = OTHER; note = 2'-O-methylcytidine-3'-phosphate
  modified_base 19: mod_base = OTHER; note = 2'-O-methyluridine-3'-phosphate
  modified_base 20: mod_base = OTHER; note = 2'-O-methylguanosine-3'-phosphate
  modified_base 21: mod_base = OTHER; note = 2'-O-methyluridine-3'-phosphate N-[tris(GalNAc-alkyl)-amidodecanoyl)]-4-hydroxyprolinol (Hyp-(GalNAc-alkyl)3)
tcccaggcacagggcatctgt

SEQ ID NO: 6976 - RNA, 21 nt, synthetic construct
  source 1..21: mol_type = other RNA
  modified_base 1: mod_base = OTHER; note = 2'-O-methylcytidine-3'-phosphorothioate
  modified_base 2: mod_base = OTHER; note = 2'-O-methyladenosine-3'-phosphorothioate
  modified_base 3: mod_base = OTHER; note = 2'-O-methyladenosine-3'-phosphate
  modified_base 4: mod_base = OTHER; note = 2'-O-methylcytidine-3'-phosphate
  modified_base 5: mod_base = OTHER; note = 2'-O-methylcytidine-3'-phosphate
  modified_base 6: mod_base = OTHER; note = 2'-O-methylcytidine-3'-phosphate
  modified_base 7: mod_base = OTHER; note = 2'-O-methyladenosine-3'-phosphate
  modified_base 8: mod_base = OTHER; note = 2'-O-methyladenosine-3'-phosphate
  modified_base 9: mod_base = OTHER; note = 2'-fluorocytidine-3'-phosphate
  modified_base 10: mod_base = OTHER; note = 2'-fluoroadenosine-3'-phosphate
  modified_base 11: mod_base = OTHER; note = 2'-fluoroadenosine-3'-phosphate
  modified_base 12: mod_base = OTHER; note = 2'-O-methylcytidine-3'-phosphate
  modified_base 13: mod_base = OTHER; note = 2'-O-methylcytidine-3'-phosphate
  modified_base 14: mod_base = OTHER; note = 2'-O-methyladenosine-3'-phosphate
  modified_base 15: mod_base = OTHER; note = 2'-O-methylcytidine-3'-phosphate
  modified_base 16: mod_base = OTHER; note = 2'-O-methylcytidine-3'-phosphate
  modified_base 17: mod_base = OTHER; note = 2'-O-methyluridine-3'-phosphate
  modified_base 18: mod_base = OTHER; note = 2'-O-methylguanosine-3'-phosphate
  modified_base 19: mod_base = OTHER; note = 2'-O-methylguanosine-3'-phosphate
  modified_base 20: mod_base = OTHER; note = 2'-O-methylcytidine-3'-phosphate
  modified_base 21: mod_base = OTHER; note = 2'-O-methyluridine-3'-phosphate N-[tris(GalNAc-alkyl)-amidodecanoyl)]-4-hydroxyprolinol (Hyp-(GalNAc-alkyl)3)
caacccaacaaccacctggct

SEQ ID NO: 6977 - RNA, 21 nt, synthetic construct
  source 1..21: mol_type = other RNA
  modified_base 1: mod_base = OTHER; note = 2'-O-methyladenosine-3'-phosphorothioate
  modified_base 2: mod_base = OTHER; note = 2'-O-methyladenosine-3'-phosphorothioate
  modified_base 3: mod_base = OTHER; note = 2'-O-methylcytidine-3'-phosphate
  modified_base 4: mod_base = OTHER; note = 2'-O-methylcytidine-3'-phosphate
  modified_base 5: mod_base = OTHER; note = 2'-O-methylcytidine-3'-phosphate
  modified_base 6: mod_base = OTHER; note = 2'-O-methyladenosine-3'-phosphate
  modified_base 7: mod_base = OTHER; note = 2'-O-methyladenosine-3'-phosphate
  modified_base 8: mod_base = OTHER; note = 2'-O-methylcytidine-3'-phosphate
  modified_base 9: mod_base = OTHER; note = 2'-fluoroadenosine-3'-phosphate
  modified_base 10: mod_base = OTHER; note = 2'-fluoroadenosine-3'-phosphate
  modified_base 11: mod_base = OTHER; note = 2'-fluorocytidine-3'-phosphate
  modified_base 12: mod_base = OTHER; note = 2'-O-methylcytidine-3'-phosphate
  modified_base 13: mod_base = OTHER; note = 2'-O-methyladenosine-3'-phosphate
  modified_base 14: mod_base = OTHER; note = 2'-O-methylcytidine-3'-phosphate
  modified_base 15: mod_base = OTHER; note = 2'-O-methylcytidine-3'-phosphate
  modified_base 16: mod_base = OTHER; note = 2'-O-methyluridine-3'-phosphate
  modified_base 17: mod_base = OTHER; note = 2'-O-methylguanosine-3'-phosphate
  modified_base 18: mod_base = OTHER; note = 2'-O-methylguanosine-3'-phosphate
  modified_base 19: mod_base = OTHER; note = 2'-O-methylcytidine-3'-phosphate
  modified_base 20: mod_base = OTHER; note = 2'-O-methyladenosine-3'-phosphate
  modified_base 21: mod_base = OTHER; note = 2'-O-methyluridine-3'-phosphate N-[tris(GalNAc-alkyl)-amidodecanoyl)]-4-hydroxyprolinol (Hyp-(GalNAc-alkyl)3)
aacccaacaaccacctggcat

SEQ ID NO: 6978 - RNA, 21 nt, synthetic construct
  source 1..21: mol_type = other RNA
  modified_base 1: mod_base = OTHER; note = 2'-O-methyladenosine-3'-phosphorothioate
  modified_base 2: mod_base = OTHER; note = 2'-O-methylcytidine-3'-phosphorothioate
  modified_base 3: mod_base = OTHER; note = 2'-O-methylcytidine-3'-phosphate
  modified_base 4: mod_base = OTHER; note = 2'-O-methylcytidine-3'-phosphate
  modified_base 5: mod_base = OTHER; note = 2'-O-methyladenosine-3'-phosphate
  modified_base 6: mod_base = OTHER; note = 2'-O-methyladenosine-3'-phosphate
  modified_base 7: mod_base = OTHER; note = 2'-O-methylcytidine-3'-phosphate
  modified_base 8: mod_base = OTHER; note = 2'-O-methyladenosine-3'-phosphate
  modified_base 9: mod_base = OTHER; note = 2'-fluoroadenosine-3'-phosphate
  modified_base 10: mod_base = OTHER; note = 2'-fluorocytidine-3'-phosphate
  modified_base 11: mod_base = OTHER; note = 2'-fluorocytidine-3'-phosphate
  modified_base 12: mod_base = OTHER; note = 2'-O-methyladenosine-3'-phosphate
  modified_base 13: mod_base = OTHER; note = 2'-O-methylcytidine-3'-phosphate
  modified_base 14: mod_base = OTHER; note = 2'-O-methylcytidine-3'-phosphate
  modified_base 15: mod_base = OTHER; note = 2'-O-methyluridine-3'-phosphate
  modified_base 16: mod_base = OTHER; note = 2'-O-methylguanosine-3'-phosphate
  modified_base 17: mod_base = OTHER; note = 2'-O-methylguanosine-3'-phosphate
  modified_base 18: mod_base = OTHER; note = 2'-O-methylcytidine-3'-phosphate
  modified_base 19: mod_base = OTHER; note = 2'-O-methyladenosine-3'-phosphate
  modified_base 20: mod_base = OTHER; note = 2'-O-methyladenosine-3'-phosphate
  modified_base 21: mod_base = OTHER; note = 2'-O-methyluridine-3'-phosphate N-[tris(GalNAc-alkyl)-amidodecanoyl)]-4-hydroxyprolinol (Hyp-(GalNAc-alkyl)3)
acccaacaaccacctggcaat

SEQ ID NO: 6979 - RNA, 21 nt, synthetic construct
  source 1..21: mol_type = other RNA
  modified_base 1: mod_base = OTHER; note = 2'-O-methylcytidine-3'-phosphorothioate
  modified_base 2: mod_base = OTHER; note = 2'-O-methylcytidine-3'-phosphorothioate
  modified_base 3: mod_base = OTHER; note = 2'-O-methylcytidine-3'-phosphate
  modified_base 4: mod_base = OTHER; note = 2'-O-methyladenosine-3'-phosphate
  modified_base 5: mod_base = OTHER; note = 2'-O-methyladenosine-3'-phosphate
  modified_base 6: mod_base = OTHER; note = 2'-O-methylcytidine-3'-phosphate
  modified_base 7: mod_base = OTHER; note = 2'-O-methyladenosine-3'-phosphate
  modified_base 8: mod_base = OTHER; note = 2'-O-methyladenosine-3'-phosphate
  modified_base 9: mod_base = OTHER; note = 2'-fluorocytidine-3'-phosphate
  modified_base 10: mod_base = OTHER; note = 2'-fluorocytidine-3'-phosphate
  modified_base 11: mod_base = OTHER; note = 2'-fluoroadenosine-3'-phosphate
  modified_base 12: mod_base = OTHER; note = 2'-O-methylcytidine-3'-phosphate
  modified_base 13: mod_base = OTHER; note = 2'-O-methylcytidine-3'-phosphate
  modified_base 14: mod_base = OTHER; note = 2'-O-methyluridine-3'-phosphate
  modified_base 15: mod_base = OTHER; note = 2'-O-methylguanosine-3'-phosphate
  modified_base 16: mod_base = OTHER; note = 2'-O-methylguanosine-3'-phosphate
  modified_base 17: mod_base = OTHER; note = 2'-O-methylcytidine-3'-phosphate
  modified_base 18: mod_base = OTHER; note = 2'-O-methyladenosine-3'-phosphate
  modified_base 19: mod_base = OTHER; note = 2'-O-methyladenosine-3'-phosphate
  modified_base 20: mod_base = OTHER; note = 2'-O-methyluridine-3'-phosphate
  modified_base 21: mod_base = OTHER; note = 2'-O-methyluridine-3'-phosphate N-[tris(GalNAc-alkyl)-amidodecanoyl)]-4-hydroxyprolinol (Hyp-(GalNAc-alkyl)3)
cccaacaaccacctggcaatt

SEQ ID NO: 6980 - RNA, 21 nt, synthetic construct
  source 1..21: mol_type = other RNA
  modified_base 1: mod_base = OTHER; note = 2'-O-methylcytidine-3'-phosphorothioate
  modified_base 2: mod_base = OTHER; note = 2'-O-methylcytidine-3'-phosphorothioate
  modified_base 3: mod_base = OTHER; note = 2'-O-methyladenosine-3'-phosphate
  modified_base 4: mod_base = OTHER; note = 2'-O-methyladenosine-3'-phosphate
  modified_base 5: mod_base = OTHER; note = 2'-O-methylcytidine-3'-phosphate
  modified_base 6: mod_base = OTHER; note = 2'-O-methyladenosine-3'-phosphate
  modified_base 7: mod_base = OTHER; note = 2'-O-methyladenosine-3'-phosphate
  modified_base 8: mod_base = OTHER; note = 2'-O-methylcytidine-3'-phosphate
  modified_base 9: mod_base = OTHER; note = 2'-fluorocytidine-3'-phosphate
  modified_base 10: mod_base = OTHER; note = 2'-fluoroadenosine-3'-phosphate
  modified_base 11: mod_base = OTHER; note = 2'-fluorocytidine-3'-phosphate
  modified_base 12: mod_base = OTHER; note = 2'-O-methylcytidine-3'-phosphate
  modified_base 13: mod_base = OTHER; note = 2'-O-methyluridine-3'-phosphate
  modified_base 14: mod_base = OTHER; note = 2'-O-methylguanosine-3'-phosphate
  modified_base 15: mod_base = OTHER; note = 2'-O-methylguanosine-3'-phosphate
  modified_base 16: mod_base = OTHER; note = 2'-O-methylcytidine-3'-phosphate
  modified_base 17: mod_base = OTHER; note = 2'-O-methyladenosine-3'-phosphate
  modified_base 18: mod_base = OTHER; note = 2'-O-methyladenosine-3'-phosphate
  modified_base 19: mod_base = OTHER; note = 2'-O-methyluridine-3'-phosphate
  modified_base 20: mod_base = OTHER; note = 2'-O-methyladenosine-3'-phosphate
  modified_base 21: mod_base = OTHER; note = 2'-O-methyluridine-3'-phosphate N-[tris(GalNAc-alkyl)-amidodecanoyl)]-4-hydroxyprolinol (Hyp-(GalNAc-alkyl)3)
ccaacaaccacctggcaatat

SEQ ID NO: 6981 - RNA, 21 nt, synthetic construct
  source 1..21: mol_type = other RNA
  modified_base 1: mod_base = OTHER; note = 2'-O-methylcytidine-3'-phosphorothioate
  modified_base 2: mod_base = OTHER; note = 2'-O-methyladenosine-3'-phosphorothioate
  modified_base 3: mod_base = OTHER; note = 2'-O-methyladenosine-3'-phosphate
  modified_base 4: mod_base = OTHER; note = 2'-O-methylcytidine-3'-phosphate
  modified_base 5: mod_base = OTHER; note = 2'-O-methyladenosine-3'-phosphate
  modified_base 6: mod_base = OTHER; note = 2'-O-methyladenosine-3'-phosphate
  modified_base 7: mod_base = OTHER; note = 2'-O-methylcytidine-3'-phosphate
  modified_base 8: mod_base = OTHER; note = 2'-O-methylcytidine-3'-phosphate
  modified_base 9: mod_base = OTHER; note = 2'-fluoroadenosine-3'-phosphate
  modified_base 10: mod_base = OTHER; note = 2'-fluorocytidine-3'-phosphate
  modified_base 11: mod_base = OTHER; note = 2'-fluorocytidine-3'-phosphate
  modified_base 12: mod_base = OTHER; note = 2'-O-methyluridine-3'-phosphate
  modified_base 13: mod_base = OTHER; note = 2'-O-methylguanosine-3'-phosphate
  modified_base 14: mod_base = OTHER; note = 2'-O-methylguanosine-3'-phosphate
  modified_base 15: mod_base = OTHER; note = 2'-O-methylcytidine-3'-phosphate
  modified_base 16: mod_base = OTHER; note = 2'-O-methyladenosine-3'-phosphate
  modified_base 17: mod_base = OTHER; note = 2'-O-methyladenosine-3'-phosphate
  modified_base 18: mod_base = OTHER; note = 2'-O-methyluridine-3'-phosphate
  modified_base 19: mod_base = OTHER; note = 2'-O-methyladenosine-3'-phosphate
  modified_base 20: mod_base = OTHER; note = 2'-O-methyluridine-3'-phosphate
  modified_base 21: mod_base = OTHER; note = 2'-O-methyluridine-3'-phosphate N-[tris(GalNAc-alkyl)-amidodecanoyl)]-4-hydroxyprolinol (Hyp-(GalNAc-alkyl)3)
caacaaccacctggcaatatt

SEQ ID NO: 6982 - RNA, 21 nt, synthetic construct
  source 1..21: mol_type = other RNA
  modified_base 1: mod_base = OTHER; note = 2'-O-methyladenosine-3'-phosphorothioate
  modified_base 2: mod_base = OTHER; note = 2'-O-methyladenosine-3'-phosphorothioate
  modified_base 3: mod_base = OTHER; note = 2'-O-methylcytidine-3'-phosphate
  modified_base 4: mod_base = OTHER; note = 2'-O-methyladenosine-3'-phosphate
  modified_base 5: mod_base = OTHER; note = 2'-O-methyladenosine-3'-phosphate
  modified_base 6: mod_base = OTHER; note = 2'-O-methylcytidine-3'-phosphate
  modified_base 7: mod_base = OTHER; note = 2'-O-methylcytidine-3'-phosphate
  modified_base 8: mod_base = OTHER; note = 2'-O-methyladenosine-3'-phosphate
  modified_base 9: mod_base = OTHER; note = 2'-fluorocytidine-3'-phosphate
  modified_base 10: mod_base = OTHER; note = 2'-fluorocytidine-3'-phosphate
  modified_base 11: mod_base = OTHER; note = 2'-fluorouridine-3'-phosphate
  modified_base 12: mod_base = OTHER; note = 2'-O-methylguanosine-3'-phosphate
  modified_base 13: mod_base = OTHER; note = 2'-O-methylguanosine-3'-phosphate
  modified_base 14: mod_base = OTHER; note = 2'-O-methylcytidine-3'-phosphate
  modified_base 15: mod_base = OTHER; note = 2'-O-methyladenosine-3'-phosphate
  modified_base 16: mod_base = OTHER; note = 2'-O-methyladenosine-3'-phosphate
  modified_base 17: mod_base = OTHER; note = 2'-O-methyluridine-3'-phosphate
  modified_base 18: mod_base = OTHER; note = 2'-O-methyladenosine-3'-phosphate
  modified_base 19: mod_base = OTHER; note = 2'-O-methyluridine-3'-phosphate
  modified_base 20: mod_base = OTHER; note = 2'-O-methylguanosine-3'-phosphate
  modified_base 21: mod_base = OTHER; note = 2'-O-methyluridine-3'-phosphate N-[tris(GalNAc-alkyl)-amidodecanoyl)]-4-hydroxyprolinol (Hyp-(GalNAc-alkyl)3)
aacaaccacctggcaatatgt

SEQ ID NO: 6983 - RNA, 21 nt, synthetic construct
  source 1..21: mol_type = other RNA
  modified_base 1: mod_base = OTHER; note = 2'-O-methyladenosine-3'-phosphorothioate
  modified_base 2: mod_base = OTHER; note = 2'-O-methylcytidine-3'-phosphorothioate
  modified_base 3: mod_base = OTHER; note = 2'-O-methyladenosine-3'-phosphate
  modified_base 4: mod_base = OTHER; note = 2'-O-methyladenosine-3'-phosphate
  modified_base 5: mod_base = OTHER; note = 2'-O-methylcytidine-3'-phosphate
  modified_base 6: mod_base = OTHER; note = 2'-O-methylcytidine-3'-phosphate
  modified_base 7: mod_base = OTHER; note = 2'-O-methyladenosine-3'-phosphate
  modified_base 8: mod_base = OTHER; note = 2'-O-methylcytidine-3'-phosphate
  modified_base 9: mod_base = OTHER; note = 2'-fluorocytidine-3'-phosphate
  modified_base 10: mod_base = OTHER; note = 2'-fluorouridine-3'-phosphate
  modified_base 11: mod_base = OTHER; note = 2'-fluoroguanosine-3'-phosphate
  modified_base 12: mod_base = OTHER; note = 2'-O-methylguanosine-3'-phosphate
  modified_base 13: mod_base = OTHER; note = 2'-O-methylcytidine-3'-phosphate
  modified_base 14: mod_base = OTHER; note = 2'-O-methyladenosine-3'-phosphate
  modified_base 15: mod_base = OTHER; note = 2'-O-methyladenosine-3'-phosphate
  modified_base 16: mod_base = OTHER; note = 2'-O-methyluridine-3'-phosphate
  modified_base 17: mod_base = OTHER; note = 2'-O-methyladenosine-3'-phosphate
  modified_base 18: mod_base = OTHER; note = 2'-O-methyluridine-3'-phosphate
  modified_base 19: mod_base = OTHER; note = 2'-O-methylguanosine-3'-phosphate
  modified_base 20: mod_base = OTHER; note = 2'-O-methyladenosine-3'-phosphate
  modified_base 21: mod_base = OTHER; note = 2'-O-methyluridine-3'-phosphate N-[tris(GalNAc-alkyl)-amidodecanoyl)]-4-hydroxyprolinol (Hyp-(GalNAc-alkyl)3)
acaaccacctggcaatatgat

SEQ ID NO: 6984 - RNA, 21 nt, synthetic construct
  source 1..21: mol_type = other RNA
  modified_base 1: mod_base = OTHER; note = 2'-O-methylcytidine-3'-phosphorothioate
  modified_base 2: mod_base = OTHER; note = 2'-O-methyladenosine-3'-phosphorothioate
  modified_base 3: mod_base = OTHER; note = 2'-O-methyladenosine-3'-phosphate
  modified_base 4: mod_base = OTHER; note = 2'-O-methylcytidine-3'-phosphate
  modified_base 5: mod_base = OTHER; note = 2'-O-methylcytidine-3'-phosphate
  modified_base 6: mod_base = OTHER; note = 2'-O-methyladenosine-3'-phosphate
  modified_base 7: mod_base = OTHER; note = 2'-O-methylcytidine-3'-phosphate
  modified_base 8: mod_base = OTHER; note = 2'-O-methylcytidine-3'-phosphate
  modified_base 9: mod_base = OTHER; note = 2'-fluorouridine-3'-phosphate
  modified_base 10: mod_base = OTHER; note = 2'-fluoroguanosine-3'-phosphate
  modified_base 11: mod_base = OTHER; note = 2'-fluoroguanosine-3'-phosphate
  modified_base 12: mod_base = OTHER; note = 2'-O-methylcytidine-3'-phosphate
  modified_base 13: mod_base = OTHER; note = 2'-O-methyladenosine-3'-phosphate
  modified_base 14: mod_base = OTHER; note = 2'-O-methyladenosine-3'-phosphate
  modified_base 15: mod_base = OTHER; note = 2'-O-methyluridine-3'-phosphate
  modified_base 16: mod_base = OTHER; note = 2'-O-methyladenosine-3'-phosphate
  modified_base 17: mod_base = OTHER; note = 2'-O-methyluridine-3'-phosphate
  modified_base 18: mod_base = OTHER; note = 2'-O-methylguanosine-3'-phosphate
  modified_base 19: mod_base = OTHER; note = 2'-O-methyladenosine-3'-phosphate
  modified_base 20: mod_base = OTHER; note = 2'-O-methylcytidine-3'-phosphate
  modified_base 21: mod_base = OTHER; note = 2'-O-methyluridine-3'-phosphate N-[tris(GalNAc-alkyl)-amidodecanoyl)]-4-hydroxyprolinol (Hyp-(GalNAc-alkyl)3)
caaccacctggcaatatgact

SEQ ID NO: 6985 - RNA, 21 nt, synthetic construct
  source 1..21: mol_type = other RNA
  modified_base 1: mod_base = OTHER; note = 2'-O-methyladenosine-3'-phosphorothioate
  modified_base 2: mod_base = OTHER; note = 2'-O-methyladenosine-3'-phosphorothioate
  modified_base 3: mod_base = OTHER; note = 2'-O-methylcytidine-3'-phosphate
  modified_base 4: mod_base = OTHER; note = 2'-O-methylcytidine-3'-phosphate
  modified_base 5: mod_base = OTHER; note = 2'-O-methyladenosine-3'-phosphate
  modified_base 6: mod_base = OTHER; note = 2'-O-methylcytidine-3'-phosphate
  modified_base 7: mod_base = OTHER; note = 2'-O-methylcytidine-3'-phosphate
  modified_base 8: mod_base = OTHER; note = 2'-O-methyluridine-3'-phosphate
  modified_base 9: mod_base = OTHER; note = 2'-fluoroguanosine-3'-phosphate
  modified_base 10: mod_base = OTHER; note = 2'-fluoroguanosine-3'-phosphate
  modified_base 11: mod_base = OTHER; note = 2'-fluorocytidine-3'-phosphate
  modified_base 12: mod_base = OTHER; note = 2'-O-methyladenosine-3'-phosphate
  modified_base 13: mod_base = OTHER; note = 2'-O-methyladenosine-3'-phosphate
  modified_base 14: mod_base = OTHER; note = 2'-O-methyluridine-3'-phosphate
  modified_base 15: mod_base = OTHER; note = 2'-O-methyladenosine-3'-phosphate
  modified_base 16: mod_base = OTHER; note = 2'-O-methyluridine-3'-phosphate
  modified_base 17: mod_base = OTHER; note = 2'-O-methylguanosine-3'-phosphate
  modified_base 18: mod_base = OTHER; note = 2'-O-methyladenosine-3'-phosphate
  modified_base 19: mod_base = OTHER; note = 2'-O-methylcytidine-3'-phosphate
  modified_base 20: mod_base = OTHER; note = 2'-O-methyluridine-3'-phosphate
  modified_base 21: mod_base = OTHER; note = 2'-O-methyluridine-3'-phosphate N-[tris(GalNAc-alkyl)-amidodecanoyl)]-4-hydroxyprolinol (Hyp-(GalNAc-alkyl)3)
aaccacctggcaatatgactt

SEQ ID NO: 6986 - RNA, 21 nt, synthetic construct
  source 1..21: mol_type = other RNA
  modified_base 1: mod_base = OTHER; note = 2'-O-methyladenosine-3'-phosphorothioate
  modified_base 2: mod_base = OTHER; note = 2'-O-methylcytidine-3'-phosphorothioate
  modified_base 3: mod_base = OTHER; note = 2'-O-methylcytidine-3'-phosphate
  modified_base 4: mod_base = OTHER; note = 2'-O-methyladenosine-3'-phosphate
  modified_base 5: mod_base = OTHER; note = 2'-O-methylcytidine-3'-phosphate
  modified_base 6: mod_base = OTHER; note = 2'-O-methylcytidine-3'-phosphate
  modified_base 7: mod_base = OTHER; note = 2'-O-methyluridine-3'-phosphate
  modified_base 8: mod_base = OTHER; note = 2'-O-methylguanosine-3'-phosphate
  modified_base 9: mod_base = OTHER; note = 2'-fluoroguanosine-3'-phosphate
  modified_base 10: mod_base = OTHER; note = 2'-fluorocytidine-3'-phosphate
  modified_base 11: mod_base = OTHER; note = 2'-fluoroadenosine-3'-phosphate
  modified_base 12: mod_base = OTHER; note = 2'-O-methyladenosine-3'-phosphate
  modified_base 13: mod_base = OTHER; note = 2'-O-methyluridine-3'-phosphate
  modified_base 14: mod_base = OTHER; note = 2'-O-methyladenosine-3'-phosphate
  modified_base 15: mod_base = OTHER; note = 2'-O-methyluridine-3'-phosphate
  modified_base 16: mod_base = OTHER; note = 2'-O-methylguanosine-3'-phosphate
  modified_base 17: mod_base = OTHER; note = 2'-O-methyladenosine-3'-phosphate
  modified_base 18: mod_base = OTHER; note = 2'-O-methylcytidine-3'-phosphate
  modified_base 19: mod_base = OTHER; note = 2'-O-methyluridine-3'-phosphate
  modified_base 20: mod_base = OTHER; note = 2'-O-methylcytidine-3'-phosphate
  modified_base 21: mod_base = OTHER; note = 2'-O-methyluridine-3'-phosphate N-[tris(GalNAc-alkyl)-amidodecanoyl)]-4-hydroxyprolinol (Hyp-(GalNAc-alkyl)3)
accacctggcaatatgactct

SEQ ID NO: 6987 - RNA, 21 nt, synthetic construct
  source 1..21: mol_type = other RNA
  modified_base 1: mod_base = OTHER; note = 2'-O-methylcytidine-3'-phosphorothioate
  modified_base 2: mod_base = OTHER; note = 2'-O-methylcytidine-3'-phosphorothioate
  modified_base 3: mod_base = OTHER; note = 2'-O-methyladenosine-3'-phosphate
  modified_base 4: mod_base = OTHER; note = 2'-O-methylcytidine-3'-phosphate
  modified_base 5: mod_base = OTHER; note = 2'-O-methylcytidine-3'-phosphate
  modified_base 6: mod_base = OTHER; note = 2'-O-methyluridine-3'-phosphate
  modified_base 7: mod_base = OTHER; note = 2'-O-methylguanosine-3'-phosphate
  modified_base 8: mod_base = OTHER; note = 2'-O-methylguanosine-3'-phosphate
  modified_base 9: mod_base = OTHER; note = 2'-fluorocytidine-3'-phosphate
  modified_base 10: mod_base = OTHER; note = 2'-fluoroadenosine-3'-phosphate
  modified_base 11: mod_base = OTHER; note = 2'-fluoroadenosine-3'-phosphate
  modified_base 12: mod_base = OTHER; note = 2'-O-methyluridine-3'-phosphate
  modified_base 13: mod_base = OTHER; note = 2'-O-methyladenosine-3'-phosphate
  modified_base 14: mod_base = OTHER; note = 2'-O-methyluridine-3'-phosphate
  modified_base 15: mod_base = OTHER; note = 2'-O-methylguanosine-3'-phosphate
  modified_base 16: mod_base = OTHER; note = 2'-O-methyladenosine-3'-phosphate
  modified_base 17: mod_base = OTHER; note = 2'-O-methylcytidine-3'-phosphate
  modified_base 18: mod_base = OTHER; note = 2'-O-methyluridine-3'-phosphate
  modified_base 19: mod_base = OTHER; note = 2'-O-methylcytidine-3'-phosphate
  modified_base 20: mod_base = OTHER; note = 2'-O-methyladenosine-3'-phosphate
  modified_base 21: mod_base = OTHER; note = 2'-O-methyluridine-3'-phosphate N-[tris(GalNAc-alkyl)-amidodecanoyl)]-4-hydroxyprolinol (Hyp-(GalNAc-alkyl)3)
ccacctggcaatatgactcat

SEQ ID NO: 6988 - RNA, 21 nt, synthetic construct
  source 1..21: mol_type = other RNA
  modified_base 1: mod_base = OTHER; note = 2'-O-methylcytidine-3'-phosphorothioate
  modified_base 2: mod_base = OTHER; note = 2'-O-methyladenosine-3'-phosphorothioate
  modified_base 3: mod_base = OTHER; note = 2'-O-methylcytidine-3'-phosphate
  modified_base 4: mod_base = OTHER; note = 2'-O-methylcytidine-3'-phosphate
  modified_base 5: mod_base = OTHER; note = 2'-O-methyluridine-3'-phosphate
  modified_base 6: mod_base = OTHER; note = 2'-O-methylguanosine-3'-phosphate
  modified_base 7: mod_base = OTHER; note = 2'-O-methylguanosine-3'-phosphate
  modified_base 8: mod_base = OTHER; note = 2'-O-methylcytidine-3'-phosphate
  modified_base 9: mod_base = OTHER; note = 2'-fluoroadenosine-3'-phosphate
  modified_base 10: mod_base = OTHER; note = 2'-fluoroadenosine-3'-phosphate
  modified_base 11: mod_base = OTHER; note = 2'-fluorouridine-3'-phosphate
  modified_base 12: mod_base = OTHER; note = 2'-O-methyladenosine-3'-phosphate
  modified_base 13: mod_base = OTHER; note = 2'-O-methyluridine-3'-phosphate
  modified_base 14: mod_base = OTHER; note = 2'-O-methylguanosine-3'-phosphate
  modified_base 15: mod_base = OTHER; note = 2'-O-methyladenosine-3'-phosphate
  modified_base 16: mod_base = OTHER; note = 2'-O-methylcytidine-3'-phosphate
  modified_base 17: mod_base = OTHER; note = 2'-O-methyluridine-3'-phosphate
  modified_base 18: mod_base = OTHER; note = 2'-O-methylcytidine-3'-phosphate
  modified_base 19: mod_base = OTHER; note = 2'-O-methyladenosine-3'-phosphate
  modified_base 20: mod_base = OTHER; note = 2'-O-methylcytidine-3'-phosphate
  modified_base 21: mod_base = OTHER; note = 2'-O-methyluridine-3'-phosphate N-[tris(GalNAc-alkyl)-amidodecanoyl)]-4-hydroxyprolinol (Hyp-(GalNAc-alkyl)3)
cacctggcaatatgactcact

SEQ ID NO: 6989 - RNA, 21 nt, synthetic construct
  source 1..21: mol_type = other RNA
  modified_base 1: mod_base = OTHER; note = 2'-O-methyladenosine-3'-phosphorothioate
  modified_base 2: mod_base = OTHER; note = 2'-O-methylcytidine-3'-phosphorothioate
  modified_base 3: mod_base = OTHER; note = 2'-O-methylcytidine-3'-phosphate
  modified_base 4: mod_base = OTHER; note = 2'-O-methyluridine-3'-phosphate
  modified_base 5: mod_base = OTHER; note = 2'-O-methylguanosine-3'-phosphate
  modified_base 6: mod_base = OTHER; note = 2'-O-methylguanosine-3'-phosphate
  modified_base 7: mod_base = OTHER; note = 2'-O-methylcytidine-3'-phosphate
  modified_base 8: mod_base = OTHER; note = 2'-O-methyladenosine-3'-phosphate
  modified_base 9: mod_base = OTHER; note = 2'-fluoroadenosine-3'-phosphate
  modified_base 10: mod_base = OTHER; note = 2'-fluorouridine-3'-phosphate
  modified_base 11: mod_base = OTHER; note = 2'-fluoroadenosine-3'-phosphate
  modified_base 12: mod_base = OTHER; note = 2'-O-methyluridine-3'-phosphate
  modified_base 13: mod_base = OTHER; note = 2'-O-methylguanosine-3'-phosphate
  modified_base 14: mod_base = OTHER; note = 2'-O-methyladenosine-3'-phosphate
  modified_base 15: mod_base = OTHER; note = 2'-O-methylcytidine-3'-phosphate
  modified_base 16: mod_base = OTHER; note = 2'-O-methyluridine-3'-phosphate
  modified_base 17: mod_base = OTHER; note = 2'-O-methylcytidine-3'-phosphate
  modified_base 18: mod_base = OTHER; note = 2'-O-methyladenosine-3'-phosphate
  modified_base 19: mod_base = OTHER; note = 2'-O-methylcytidine-3'-phosphate
  modified_base 20: mod_base = OTHER; note = 2'-O-methyluridine-3'-phosphate
  modified_base 21: mod_base = OTHER; note = 2'-O-methyluridine-3'-phosphate N-[tris(GalNAc-alkyl)-amidodecanoyl)]-4-hydroxyprolinol (Hyp-(GalNAc-alkyl)3)
acctggcaatatgactcactt

SEQ ID NO: 6990 - RNA, 21 nt, synthetic construct
  source 1..21: mol_type = other RNA
  modified_base 1: mod_base = OTHER; note = 2'-O-methylcytidine-3'-phosphorothioate
  modified_base 2: mod_base = OTHER; note = 2'-O-methylcytidine-3'-phosphorothioate
  modified_base 3: mod_base = OTHER; note = 2'-O-methyluridine-3'-phosphate
  modified_base 4: mod_base = OTHER; note = 2'-O-methylguanosine-3'-phosphate
  modified_base 5: mod_base = OTHER; note = 2'-O-methylguanosine-3'-phosphate
  modified_base 6: mod_base = OTHER; note = 2'-O-methylcytidine-3'-phosphate
  modified_base 7: mod_base = OTHER; note = 2'-O-methyladenosine-3'-phosphate
  modified_base 8: mod_base = OTHER; note = 2'-O-methyladenosine-3'-phosphate
  modified_base 9: mod_base = OTHER; note = 2'-fluorouridine-3'-phosphate
  modified_base 10: mod_base = OTHER; note = 2'-fluoroadenosine-3'-phosphate
  modified_base 11: mod_base = OTHER; note = 2'-fluorouridine-3'-phosphate
  modified_base 12: mod_base = OTHER; note = 2'-O-methylguanosine-3'-phosphate
  modified_base 13: mod_base = OTHER; note = 2'-O-methyladenosine-3'-phosphate
  modified_base 14: mod_base = OTHER; note = 2'-O-methylcytidine-3'-phosphate
  modified_base 15: mod_base = OTHER; note = 2'-O-methyluridine-3'-phosphate
  modified_base 16: mod_base = OTHER; note = 2'-O-methylcytidine-3'-phosphate
  modified_base 17: mod_base = OTHER; note = 2'-O-methyladenosine-3'-phosphate
  modified_base 18: mod_base = OTHER; note = 2'-O-methylcytidine-3'-phosphate
  modified_base 19: mod_base = OTHER; note = 2'-O-methyluridine-3'-phosphate
  modified_base 20: mod_base = OTHER; note = 2'-O-methyluridine-3'-phosphate
  modified_base 21: mod_base = OTHER; note = 2'-O-methyluridine-3'-phosphate N-[tris(GalNAc-alkyl)-amidodecanoyl)]-4-hydroxyprolinol (Hyp-(GalNAc-alkyl)3)
cctggcaatatgactcacttt

SEQ ID NO: 6991 - RNA, 21 nt, synthetic construct
  source 1..21: mol_type = other RNA
  modified_base 1: mod_base = OTHER; note = 2'-O-methylcytidine-3'-phosphorothioate
  modified_base 2: mod_base = OTHER; note = 2'-O-methyluridine-3'-phosphorothioate
  modified_base 3: mod_base = OTHER; note = 2'-O-methylguanosine-3'-phosphate
  modified_base 4: mod_base = OTHER; note = 2'-O-methylguanosine-3'-phosphate
  modified_base 5: mod_base = OTHER; note = 2'-O-methylcytidine-3'-phosphate
  modified_base 6: mod_base = OTHER; note = 2'-O-methyladenosine-3'-phosphate
  modified_base 7: mod_base = OTHER; note = 2'-O-methyladenosine-3'-phosphate
  modified_base 8: mod_base = OTHER; note = 2'-O-methyluridine-3'-phosphate
  modified_base 9: mod_base = OTHER; note = 2'-fluoroadenosine-3'-phosphate
  modified_base 10: mod_base = OTHER; note = 2'-fluorouridine-3'-phosphate
  modified_base 11: mod_base = OTHER; note = 2'-fluoroguanosine-3'-phosphate
  modified_base 12: mod_base = OTHER; note = 2'-O-methyladenosine-3'-phosphate
  modified_base 13: mod_base = OTHER; note = 2'-O-methylcytidine-3'-phosphate
  modified_base 14: mod_base = OTHER; note = 2'-O-methyluridine-3'-phosphate
  modified_base 15: mod_base = OTHER; note = 2'-O-methylcytidine-3'-phosphate
  modified_base 16: mod_base = OTHER; note = 2'-O-methyladenosine-3'-phosphate
  modified_base 17: mod_base = OTHER; note = 2'-O-methylcytidine-3'-phosphate
  modified_base 18: mod_base = OTHER; note = 2'-O-methyluridine-3'-phosphate
  modified_base 19: mod_base = OTHER; note = 2'-O-methyluridine-3'-phosphate
  modified_base 20: mod_base = OTHER; note = 2'-O-methylguanosine-3'-phosphate
  modified_base 21: mod_base = OTHER; note = 2'-O-methyluridine-3'-phosphate N-[tris(GalNAc-alkyl)-amidodecanoyl)]-4-hydroxyprolinol (Hyp-(GalNAc-alkyl)3)
ctggcaatatgactcacttgt

SEQ ID NO: 6992 - RNA, 21 nt, synthetic construct
  source 1..21: mol_type = other RNA
  modified_base 1: mod_base = OTHER; note = 2'-O-methyluridine-3'-phosphorothioate
  modified_base 2: mod_base = OTHER; note = 2'-O-methylguanosine-3'-phosphorothioate
  modified_base 3: mod_base = OTHER; note = 2'-O-methylguanosine-3'-phosphate
  modified_base 4: mod_base = OTHER; note = 2'-O-methylcytidine-3'-phosphate
  modified_base 5: mod_base = OTHER; note = 2'-O-methyladenosine-3'-phosphate
  modified_base 6: mod_base = OTHER; note = 2'-O-methyladenosine-3'-phosphate
  modified_base 7: mod_base = OTHER; note = 2'-O-methyluridine-3'-phosphate
  modified_base 8: mod_base = OTHER; note = 2'-O-methyladenosine-3'-phosphate
  modified_base 9: mod_base = OTHER; note = 2'-fluorouridine-3'-phosphate
  modified_base 10: mod_base = OTHER; note = 2'-fluoroguanosine-3'-phosphate
  modified_base 11: mod_base = OTHER; note = 2'-fluoroadenosine-3'-phosphate
  modified_base 12: mod_base = OTHER; note = 2'-O-methylcytidine-3'-phosphate
  modified_base 13: mod_base = OTHER; note = 2'-O-methyluridine-3'-phosphate
  modified_base 14: mod_base = OTHER; note = 2'-O-methylcytidine-3'-phosphate
  modified_base 15: mod_base = OTHER; note = 2'-O-methyladenosine-3'-phosphate
  modified_base 16: mod_base = OTHER; note = 2'-O-methylcytidine-3'-phosphate
  modified_base 17: mod_base = OTHER; note = 2'-O-methyluridine-3'-phosphate
  modified_base 18: mod_base = OTHER; note = 2'-O-methyluridine-3'-phosphate
  modified_base 19: mod_base = OTHER; note = 2'-O-methylguanosine-3'-phosphate
  modified_base 20: mod_base = OTHER; note = 2'-O-methyladenosine-3'-phosphate
  modified_base 21: mod_base = OTHER; note = 2'-O-methyluridine-3'-phosphate N-[tris(GalNAc-alkyl)-amidodecanoyl)]-4-hydroxyprolinol (Hyp-(GalNAc-alkyl)3)
tggcaatatgactcacttgat

SEQ ID NO: 6993 - RNA, 21 nt, synthetic construct
  source 1..21: mol_type = other RNA
  modified_base 1: mod_base = OTHER; note = 2'-O-methylguanosine-3'-phosphorothioate
  modified_base 2: mod_base = OTHER; note = 2'-O-methylguanosine-3'-phosphorothioate
  modified_base 3: mod_base = OTHER; note = 2'-O-methylcytidine-3'-phosphate
  modified_base 4: mod_base = OTHER; note = 2'-O-methyladenosine-3'-phosphate
  modified_base 5: mod_base = OTHER; note = 2'-O-methyladenosine-3'-phosphate
  modified_base 6: mod_base = OTHER; note = 2'-O-methyluridine-3'-phosphate
  modified_base 7: mod_base = OTHER; note = 2'-O-methyladenosine-3'-phosphate
  modified_base 8: mod_base = OTHER; note = 2'-O-methyluridine-3'-phosphate
  modified_base 9: mod_base = OTHER; note = 2'-fluoroguanosine-3'-phosphate
  modified_base 10: mod_base = OTHER; note = 2'-fluoroadenosine-3'-phosphate
  modified_base 11: mod_base = OTHER; note = 2'-fluorocytidine-3'-phosphate
  modified_base 12: mod_base = OTHER; note = 2'-O-methyluridine-3'-phosphate
  modified_base 13: mod_base = OTHER; note = 2'-O-methylcytidine-3'-phosphate
  modified_base 14: mod_base = OTHER; note = 2'-O-methyladenosine-3'-phosphate
  modified_base 15: mod_base = OTHER; note = 2'-O-methylcytidine-3'-phosphate
  modified_base 16: mod_base = OTHER; note = 2'-O-methyluridine-3'-phosphate
  modified_base 17: mod_base = OTHER; note = 2'-O-methyluridine-3'-phosphate
  modified_base 18: mod_base = OTHER; note = 2'-O-methylguanosine-3'-phosphate
  modified_base 19: mod_base = OTHER; note = 2'-O-methyladenosine-3'-phosphate
  modified_base 20: mod_base = OTHER; note = 2'-O-methylcytidine-3'-phosphate
  modified_base 21: mod_base = OTHER; note = 2'-O-methyluridine-3'-phosphate N-[tris(GalNAc-alkyl)-amidodecanoyl)]-4-hydroxyprolinol (Hyp-(GalNAc-alkyl)3)
ggcaatatgactcacttgact

SEQ ID NO: 6994 - RNA, 21 nt, synthetic construct
  source 1..21: mol_type = other RNA
  modified_base 1: mod_base = OTHER; note = 2'-O-methylguanosine-3'-phosphorothioate
  modified_base 2: mod_base = OTHER; note = 2'-O-methylcytidine-3'-phosphorothioate
  modified_base 3: mod_base = OTHER; note = 2'-O-methyladenosine-3'-phosphate
  modified_base 4: mod_base = OTHER; note = 2'-O-methyladenosine-3'-phosphate
  modified_base 5: mod_base = OTHER; note = 2'-O-methyluridine-3'-phosphate
  modified_base 6: mod_base = OTHER; note = 2'-O-methyladenosine-3'-phosphate
  modified_base 7: mod_base = OTHER; note = 2'-O-methyluridine-3'-phosphate
  modified_base 8: mod_base = OTHER; note = 2'-O-methylguanosine-3'-phosphate
  modified_base 9: mod_base = OTHER; note = 2'-fluoroadenosine-3'-phosphate
  modified_base 10: mod_base = OTHER; note = 2'-fluorocytidine-3'-phosphate
  modified_base 11: mod_base = OTHER; note = 2'-fluorouridine-3'-phosphate
  modified_base 12: mod_base = OTHER; note = 2'-O-methylcytidine-3'-phosphate
  modified_base 13: mod_base = OTHER; note = 2'-O-methyladenosine-3'-phosphate
  modified_base 14: mod_base = OTHER; note = 2'-O-methylcytidine-3'-phosphate
  modified_base 15: mod_base = OTHER; note = 2'-O-methyluridine-3'-phosphate
  modified_base 16: mod_base = OTHER; note = 2'-O-methyluridine-3'-phosphate
  modified_base 17: mod_base = OTHER; note = 2'-O-methylguanosine-3'-phosphate
  modified_base 18: mod_base = OTHER; note = 2'-O-methyladenosine-3'-phosphate
  modified_base 19: mod_base = OTHER; note = 2'-O-methylcytidine-3'-phosphate
  modified_base 20: mod_base = OTHER; note = 2'-O-methylcytidine-3'-phosphate
  modified_base 21: mod_base = OTHER; note = 2'-O-methyluridine-3'-phosphate N-[tris(GalNAc-alkyl)-amidodecanoyl)]-4-hydroxyprolinol (Hyp-(GalNAc-alkyl)3)
gcaatatgactcacttgacct

SEQ ID NO: 6995 - RNA, 21 nt, synthetic construct
  source 1..21: mol_type = other RNA
  modified_base 1: mod_base = OTHER; note = 2'-O-methylguanosine-3'-phosphorothioate
  modified_base 2: mod_base = OTHER; note = 2'-O-methylguanosine-3'-phosphorothioate
  modified_base 3: mod_base = OTHER; note = 2'-O-methyladenosine-3'-phosphate
  modified_base 4: mod_base = OTHER; note = 2'-O-methylcytidine-3'-phosphate
  modified_base 5: mod_base = OTHER; note = 2'-O-methylcytidine-3'-phosphate
  modified_base 6: mod_base = OTHER; note = 2'-O-methylcytidine-3'-phosphate
  modified_base 7: mod_base = OTHER; note = 2'-O-methyladenosine-3'-phosphate
  modified_base 8: mod_base = OTHER; note = 2'-O-methyladenosine-3'-phosphate
  modified_base 9: mod_base = OTHER; note = 2'-fluoroadenosine-3'-phosphate
  modified_base 10: mod_base = OTHER; note = 2'-fluorouridine-3'-phosphate
  modified_base 11: mod_base = OTHER; note = 2'-fluoroguanosine-3'-phosphate
  modified_base 12: mod_base = OTHER; note = 2'-O-methylguanosine-3'-phosphate
  modified_base 13: mod_base = OTHER; note = 2'-O-methylguanosine-3'-phosphate
  modified_base 14: mod_base = OTHER; note = 2'-O-methylcytidine-3'-phosphate
  modified_base 15: mod_base = OTHER; note = 2'-O-methyladenosine-3'-phosphate
  modified_base 16: mod_base = OTHER; note = 2'-O-methylcytidine-3'-phosphate
  modified_base 17: mod_base = OTHER; note = 2'-O-methyluridine-3'-phosphate
  modified_base 18: mod_base = OTHER; note = 2'-O-methyluridine-3'-phosphate
  modified_base 19: mod_base = OTHER; note = 2'-O-methyluridine-3'-phosphate
  modified_base 20: mod_base = OTHER; note = 2'-O-methylcytidine-3'-phosphate
  modified_base 21: mod_base = OTHER; note = 2'-O-methyluridine-3'-phosphate N-[tris(GalNAc-alkyl)-amidodecanoyl)]-4-hydroxyprolinol (Hyp-(GalNAc-alkyl)3)
ggacccaaatgggcactttct

SEQ ID NO: 6996 - RNA, 21 nt, synthetic construct
  source 1..21: mol_type = other RNA
  modified_base 1: mod_base = OTHER; note = 2'-O-methyladenosine-3'-phosphorothioate
  modified_base 2: mod_base = OTHER; note = 2'-O-methylcytidine-3'-phosphorothioate
  modified_base 3: mod_base = OTHER; note = 2'-O-methylcytidine-3'-phosphate
  modified_base 4: mod_base = OTHER; note = 2'-O-methylcytidine-3'-phosphate
  modified_base 5: mod_base = OTHER; note = 2'-O-methyladenosine-3'-phosphate
  modified_base 6: mod_base = OTHER; note = 2'-O-methyladenosine-3'-phosphate
  modified_base 7: mod_base = OTHER; note = 2'-O-methyladenosine-3'-phosphate
  modified_base 8: mod_base = OTHER; note = 2'-O-methyluridine-3'-phosphate
  modified_base 9: mod_base = OTHER; note = 2'-fluoroguanosine-3'-phosphate
  modified_base 10: mod_base = OTHER; note = 2'-fluoroguanosine-3'-phosphate
  modified_base 11: mod_base = OTHER; note = 2'-fluoroguanosine-3'-phosphate
  modified_base 12: mod_base = OTHER; note = 2'-O-methylcytidine-3'-phosphate
  modified_base 13: mod_base = OTHER; note = 2'-O-methyladenosine-3'-phosphate
  modified_base 14: mod_base = OTHER; note = 2'-O-methylcytidine-3'-phosphate
  modified_base 15: mod_base = OTHER; note = 2'-O-methyluridine-3'-phosphate
  modified_base 16: mod_base = OTHER; note = 2'-O-methyluridine-3'-phosphate
  modified_base 17: mod_base = OTHER; note = 2'-O-methyluridine-3'-phosphate
  modified_base 18: mod_base = OTHER; note = 2'-O-methylcytidine-3'-phosphate
  modified_base 19: mod_base = OTHER; note = 2'-O-methyluridine-3'-phosphate
  modified_base 20: mod_base = OTHER; note = 2'-O-methyluridine-3'-phosphate
  modified_base 21: mod_base = OTHER; note = 2'-O-methyluridine-3'-phosphate N-[tris(GalNAc-alkyl)-amidodecanoyl)]-4-hydroxyprolinol (Hyp-(GalNAc-alkyl)3)
acccaaatgggcactttcttt

SEQ ID NO: 6997 - RNA, 21 nt, synthetic construct
  source 1..21: mol_type = other RNA
  modified_base 1: mod_base = OTHER; note = 2'-O-methylcytidine-3'-phosphorothioate
  modified_base 2: mod_base = OTHER; note = 2'-O-methylcytidine-3'-phosphorothioate
  modified_base 3: mod_base = OTHER; note = 2'-O-methylcytidine-3'-phosphate
  modified_base 4: mod_base = OTHER; note = 2'-O-methyladenosine-3'-phosphate
  modified_base 5: mod_base = OTHER; note = 2'-O-methyladenosine-3'-phosphate
  modified_base 6: mod_base = OTHER; note = 2'-O-methyladenosine-3'-phosphate
  modified_base 7: mod_base = OTHER; note = 2'-O-methyluridine-3'-phosphate
  modified_base 8: mod_base = OTHER; note = 2'-O-methylguanosine-3'-phosphate
  modified_base 9: mod_base = OTHER; note = 2'-fluoroguanosine-3'-phosphate
  modified_base 10: mod_base = OTHER; note = 2'-fluoroguanosine-3'-phosphate
  modified_base 11: mod_base = OTHER; note = 2'-fluorocytidine-3'-phosphate
  modified_base 12: mod_base = OTHER; note = 2'-O-methyladenosine-3'-phosphate
  modified_base 13: mod_base = OTHER; note = 2'-O-methylcytidine-3'-phosphate
  modified_base 14: mod_base = OTHER; note = 2'-O-methyluridine-3'-phosphate
  modified_base 15: mod_base = OTHER; note = 2'-O-methyluridine-3'-phosphate
  modified_base 16: mod_base = OTHER; note = 2'-O-methyluridine-3'-phosphate
  modified_base 17: mod_base = OTHER; note = 2'-O-methylcytidine-3'-phosphate
  modified_base 18: mod_base = OTHER; note = 2'-O-methyluridine-3'-phosphate
  modified_base 19: mod_base = OTHER; note = 2'-O-methyluridine-3'-phosphate
  modified_base 20: mod_base = OTHER; note = 2'-O-methylguanosine-3'-phosphate
  modified_base 21: mod_base = OTHER; note = 2'-O-methyluridine-3'-phosphate N-[tris(GalNAc-alkyl)-amidodecanoyl)]-4-hydroxyprolinol (Hyp-(GalNAc-alkyl)3)
cccaaatgggcactttcttgt

SEQ ID NO: 6998 - RNA, 21 nt, synthetic construct
  source 1..21: mol_type = other RNA
  modified_base 1: mod_base = OTHER; note = 2'-O-methylcytidine-3'-phosphorothioate
  modified_base 2: mod_base = OTHER; note = 2'-O-methylcytidine-3'-phosphorothioate
  modified_base 3: mod_base = OTHER; note = 2'-O-methyladenosine-3'-phosphate
  modified_base 4: mod_base = OTHER; note = 2'-O-methyladenosine-3'-phosphate
  modified_base 5: mod_base = OTHER; note = 2'-O-methyladenosine-3'-phosphate
  modified_base 6: mod_base = OTHER; note = 2'-O-methyluridine-3'-phosphate
  modified_base 7: mod_base = OTHER; note = 2'-O-methylguanosine-3'-phosphate
  modified_base 8: mod_base = OTHER; note = 2'-O-methylguanosine-3'-phosphate
  modified_base 9: mod_base = OTHER; note = 2'-fluoroguanosine-3'-phosphate
  modified_base 10: mod_base = OTHER; note = 2'-fluorocytidine-3'-phosphate
  modified_base 11: mod_base = OTHER; note = 2'-fluoroadenosine-3'-phosphate
  modified_base 12: mod_base = OTHER; note = 2'-O-methylcytidine-3'-phosphate
  modified_base 13: mod_base = OTHER; note = 2'-O-methyluridine-3'-phosphate
  modified_base 14: mod_base = OTHER; note = 2'-O-methyluridine-3'-phosphate
  modified_base 15: mod_base = OTHER; note = 2'-O-methyluridine-3'-phosphate
  modified_base 16: mod_base = OTHER; note = 2'-O-methylcytidine-3'-phosphate
  modified_base 17: mod_base = OTHER; note = 2'-O-methyluridine-3'-phosphate
  modified_base 18: mod_base = OTHER; note = 2'-O-methyluridine-3'-phosphate
  modified_base 19: mod_base = OTHER; note = 2'-O-methylguanosine-3'-phosphate
  modified_base 20: mod_base = OTHER; note = 2'-O-methyluridine-3'-phosphate
  modified_base 21: mod_base = OTHER; note = 2'-O-methyluridine-3'-phosphate N-[tris(GalNAc-alkyl)-amidodecanoyl)]-4-hydroxyprolinol (Hyp-(GalNAc-alkyl)3)
ccaaatgggcactttcttgtt

SEQ ID NO: 6999 - RNA, 21 nt, synthetic construct
  source 1..21: mol_type = other RNA
  modified_base 1: mod_base = OTHER; note = 2'-O-methylcytidine-3'-phosphorothioate
  modified_base 2: mod_base = OTHER; note = 2'-O-methyladenosine-3'-phosphorothioate
  modified_base 3: mod_base = OTHER; note = 2'-O-methyladenosine-3'-phosphate
  modified_base 4: mod_base = OTHER; note = 2'-O-methyladenosine-3'-phosphate
  modified_base 5: mod_base = OTHER; note = 2'-O-methyluridine-3'-phosphate
  modified_base 6: mod_base = OTHER; note = 2'-O-methylguanosine-3'-phosphate
  modified_base 7: mod_base = OTHER; note = 2'-O-methylguanosine-3'-phosphate
  modified_base 8: mod_base = OTHER; note = 2'-O-methylguanosine-3'-phosphate
  modified_base 9: mod_base = OTHER; note = 2'-fluorocytidine-3'-phosphate
  modified_base 10: mod_base = OTHER; note = 2'-fluoroadenosine-3'-phosphate
  modified_base 11: mod_base = OTHER; note = 2'-fluorocytidine-3'-phosphate
  modified_base 12: mod_base = OTHER; note = 2'-O-methyluridine-3'-phosphate
  modified_base 13: mod_base = OTHER; note = 2'-O-methyluridine-3'-phosphate
  modified_base 14: mod_base = OTHER; note = 2'-O-methyluridine-3'-phosphate
  modified_base 15: mod_base = OTHER; note = 2'-O-methylcytidine-3'-phosphate
  modified_base 16: mod_base = OTHER; note = 2'-O-methyluridine-3'-phosphate
  modified_base 17: mod_base = OTHER; note = 2'-O-methyluridine-3'-phosphate
  modified_base 18: mod_base = OTHER; note = 2'-O-methylguanosine-3'-phosphate
  modified_base 19: mod_base = OTHER; note = 2'-O-methyluridine-3'-phosphate
  modified_base 20: mod_base = OTHER; note = 2'-O-methylcytidine-3'-phosphate
  modified_base 21: mod_base = OTHER; note = 2'-O-methyluridine-3'-phosphate N-[tris(GalNAc-alkyl)-amidodecanoyl)]-4-hydroxyprolinol (Hyp-(GalNAc-alkyl)3)
caaatgggcactttcttgtct

SEQ ID NO: 7000 - RNA, 21 nt, synthetic construct
  source 1..21: mol_type = other RNA
  modified_base 1: mod_base = OTHER; note = 2'-O-methyladenosine-3'-phosphorothioate
  modified_base 2: mod_base = OTHER; note = 2'-O-methyladenosine-3'-phosphorothioate
  modified_base 3: mod_base = OTHER; note = 2'-O-methyladenosine-3'-phosphate
  modified_base 4: mod_base = OTHER; note = 2'-O-methyluridine-3'-phosphate
  modified_base 5: mod_base = OTHER; note = 2'-O-methylguanosine-3'-phosphate
  modified_base 6: mod_base = OTHER; note = 2'-O-methylguanosine-3'-phosphate
  modified_base 7: mod_base = OTHER; note = 2'-O-methylguanosine-3'-phosphate
  modified_base 8: mod_base = OTHER; note = 2'-O-methylcytidine-3'-phosphate
  modified_base 9: mod_base = OTHER; note = 2'-fluoroadenosine-3'-phosphate
  modified_base 10: mod_base = OTHER; note = 2'-fluorocytidine-3'-phosphate
  modified_base 11: mod_base = OTHER; note = 2'-fluorouridine-3'-phosphate
  modified_base 12: mod_base = OTHER; note = 2'-O-methyluridine-3'-phosphate
  modified_base 13: mod_base = OTHER; note = 2'-O-methyluridine-3'-phosphate
  modified_base 14: mod_base = OTHER; note = 2'-O-methylcytidine-3'-phosphate
  modified_base 15: mod_base = OTHER; note = 2'-O-methyluridine-3'-phosphate
  modified_base 16: mod_base = OTHER; note = 2'-O-methyluridine-3'-phosphate
  modified_base 17: mod_base = OTHER; note = 2'-O-methylguanosine-3'-phosphate
  modified_base 18: mod_base = OTHER; note = 2'-O-methyluridine-3'-phosphate
  modified_base 19: mod_base = OTHER; note = 2'-O-methylcytidine-3'-phosphate
  modified_base 20: mod_base = OTHER; note = 2'-O-methyluridine-3'-phosphate
  modified_base 21: mod_base = OTHER; note = 2'-O-methyluridine-3'-phosphate N-[tris(GalNAc-alkyl)-amidodecanoyl)]-4-hydroxyprolinol (Hyp-(GalNAc-alkyl)3)
aaatgggcactttcttgtctt

SEQ ID NO: 7001 - RNA, 21 nt, synthetic construct
  source 1..21: mol_type = other RNA
  modified_base 1: mod_base = OTHER; note = 2'-O-methyladenosine-3'-phosphorothioate
  modified_base 2: mod_base = OTHER; note = 2'-O-methyladenosine-3'-phosphorothioate
  modified_base 3: mod_base = OTHER; note = 2'-O-methyluridine-3'-phosphate
  modified_base 4: mod_base = OTHER; note = 2'-O-methylguanosine-3'-phosphate
  modified_base 5: mod_base = OTHER; note = 2'-O-methylguanosine-3'-phosphate
  modified_base 6: mod_base = OTHER; note = 2'-O-methylguanosine-3'-phosphate
  modified_base 7: mod_base = OTHER; note = 2'-O-methylcytidine-3'-phosphate
  modified_base 8: mod_base = OTHER; note = 2'-O-methyladenosine-3'-phosphate
  modified_base 9: mod_base = OTHER; note = 2'-fluorocytidine-3'-phosphate
  modified_base 10: mod_base = OTHER; note = 2'-fluorouridine-3'-phosphate
  modified_base 11: mod_base = OTHER; note = 2'-fluorouridine-3'-phosphate
  modified_base 12: mod_base = OTHER; note = 2'-O-methyluridine-3'-phosphate
  modified_base 13: mod_base = OTHER; note = 2'-O-methylcytidine-3'-phosphate
  modified_base 14: mod_base = OTHER; note = 2'-O-methyluridine-3'-phosphate
  modified_base 15: mod_base = OTHER; note = 2'-O-methyluridine-3'-phosphate
  modified_base 16: mod_base = OTHER; note = 2'-O-methylguanosine-3'-phosphate
  modified_base 17: mod_base = OTHER; note = 2'-O-methyluridine-3'-phosphate
  modified_base 18: mod_base = OTHER; note = 2'-O-methylcytidine-3'-phosphate
  modified_base 19: mod_base = OTHER; note = 2'-O-methyluridine-3'-phosphate
  modified_base 20: mod_base = OTHER; note = 2'-O-methylguanosine-3'-phosphate
  modified_base 21: mod_base = OTHER; note = 2'-O-methyluridine-3'-phosphate N-[tris(GalNAc-alkyl)-amidodecanoyl)]-4-hydroxyprolinol (Hyp-(GalNAc-alkyl)3)
aatgggcactttcttgtctgt

SEQ ID NO: 7002 - RNA, 21 nt, synthetic construct
  source 1..21: mol_type = other RNA
  modified_base 1: mod_base = OTHER; note = 2'-O-methyladenosine-3'-phosphorothioate
  modified_base 2: mod_base = OTHER; note = 2'-O-methyluridine-3'-phosphorothioate
  modified_base 3: mod_base = OTHER; note = 2'-O-methylguanosine-3'-phosphate
  modified_base 4: mod_base = OTHER; note = 2'-O-methylguanosine-3'-phosphate
  modified_base 5: mod_base = OTHER; note = 2'-O-methylguanosine-3'-phosphate
  modified_base 6: mod_base = OTHER; note = 2'-O-methylcytidine-3'-phosphate
  modified_base 7: mod_base = OTHER; note = 2'-O-methyladenosine-3'-phosphate
  modified_base 8: mod_base = OTHER; note = 2'-O-methylcytidine-3'-phosphate
  modified_base 9: mod_base = OTHER; note = 2'-fluorouridine-3'-phosphate
  modified_base 10: mod_base = OTHER; note = 2'-fluorouridine-3'-phosphate
  modified_base 11: mod_base = OTHER; note = 2'-fluorouridine-3'-phosphate
  modified_base 12: mod_base = OTHER; note = 2'-O-methylcytidine-3'-phosphate
  modified_base 13: mod_base = OTHER; note = 2'-O-methyluridine-3'-phosphate
  modified_base 14: mod_base = OTHER; note = 2'-O-methyluridine-3'-phosphate
  modified_base 15: mod_base = OTHER; note = 2'-O-methylguanosine-3'-phosphate
  modified_base 16: mod_base = OTHER; note = 2'-O-methyluridine-3'-phosphate
  modified_base 17: mod_base = OTHER; note = 2'-O-methylcytidine-3'-phosphate
  modified_base 18: mod_base = OTHER; note = 2'-O-methyluridine-3'-phosphate
  modified_base 19: mod_base = OTHER; note = 2'-O-methylguanosine-3'-phosphate
  modified_base 20: mod_base = OTHER; note = 2'-O-methyladenosine-3'-phosphate
  modified_base 21: mod_base = OTHER; note = 2'-O-methyluridine-3'-phosphate N-[tris(GalNAc-alkyl)-amidodecanoyl)]-4-hydroxyprolinol (Hyp-(GalNAc-alkyl)3)
atgggcactttcttgtctgat

SEQ ID NO: 7003 - RNA, 21 nt, synthetic construct
  source 1..21: mol_type = other RNA
  modified_base 1: mod_base = OTHER; note = 2'-O-methyluridine-3'-phosphorothioate
  modified_base 2: mod_base = OTHER; note = 2'-O-methylguanosine-3'-phosphorothioate
  modified_base 3: mod_base = OTHER; note = 2'-O-methylguanosine-3'-phosphate
  modified_base 4: mod_base = OTHER; note = 2'-O-methylguanosine-3'-phosphate
  modified_base 5: mod_base = OTHER; note = 2'-O-methylcytidine-3'-phosphate
  modified_base 6: mod_base = OTHER; note = 2'-O-methyladenosine-3'-phosphate
  modified_base 7: mod_base = OTHER; note = 2'-O-methylcytidine-3'-phosphate
  modified_base 8: mod_base = OTHER; note = 2'-O-methyluridine-3'-phosphate
  modified_base 9: mod_base = OTHER; note = 2'-fluorouridine-3'-phosphate
  modified_base 10: mod_base = OTHER; note = 2'-fluorouridine-3'-phosphate
  modified_base 11: mod_base = OTHER; note = 2'-fluorocytidine-3'-phosphate
  modified_base 12: mod_base = OTHER; note = 2'-O-methyluridine-3'-phosphate
  modified_base 13: mod_base = OTHER; note = 2'-O-methyluridine-3'-phosphate
  modified_base 14: mod_base = OTHER; note = 2'-O-methylguanosine-3'-phosphate
  modified_base 15: mod_base = OTHER; note = 2'-O-methyluridine-3'-phosphate
  modified_base 16: mod_base = OTHER; note = 2'-O-methylcytidine-3'-phosphate
  modified_base 17: mod_base = OTHER; note = 2'-O-methyluridine-3'-phosphate
  modified_base 18: mod_base = OTHER; note = 2'-O-methylguanosine-3'-phosphate
  modified_base 19: mod_base = OTHER; note = 2'-O-methyladenosine-3'-phosphate
  modified_base 20: mod_base = OTHER; note = 2'-O-methylguanosine-3'-phosphate
  modified_base 21: mod_base = OTHER; note = 2'-O-methyluridine-3'-phosphate N-[tris(GalNAc-alkyl)-amidodecanoyl)]-4-hydroxyprolinol (Hyp-(GalNAc-alkyl)3)
tgggcactttcttgtctgagt

SEQ ID NO: 7004 - RNA, 21 nt, synthetic construct
  source 1..21: mol_type = other RNA
  modified_base 1: mod_base = OTHER; note = 2'-O-methylguanosine-3'-phosphorothioate
  modified_base 2: mod_base = OTHER; note = 2'-O-methylguanosine-3'-phosphorothioate
  modified_base 3: mod_base = OTHER; note = 2'-O-methylguanosine-3'-phosphate
  modified_base 4: mod_base = OTHER; note = 2'-O-methylcytidine-3'-phosphate
  modified_base 5: mod_base = OTHER; note = 2'-O-methyladenosine-3'-phosphate
  modified_base 6: mod_base = OTHER; note = 2'-O-methylcytidine-3'-phosphate
  modified_base 7: mod_base = OTHER; note = 2'-O-methyluridine-3'-phosphate
  modified_base 8: mod_base = OTHER; note = 2'-O-methyluridine-3'-phosphate
  modified_base 9: mod_base = OTHER; note = 2'-fluorouridine-3'-phosphate
  modified_base 10: mod_base = OTHER; note = 2'-fluorocytidine-3'-phosphate
  modified_base 11: mod_base = OTHER; note = 2'-fluorouridine-3'-phosphate
  modified_base 12: mod_base = OTHER; note = 2'-O-methyluridine-3'-phosphate
  modified_base 13: mod_base = OTHER; note = 2'-O-methylguanosine-3'-phosphate
  modified_base 14: mod_base = OTHER; note = 2'-O-methyluridine-3'-phosphate
  modified_base 15: mod_base = OTHER; note = 2'-O-methylcytidine-3'-phosphate
  modified_base 16: mod_base = OTHER; note = 2'-O-methyluridine-3'-phosphate
  modified_base 17: mod_base = OTHER; note = 2'-O-methylguanosine-3'-phosphate
  modified_base 18: mod_base = OTHER; note = 2'-O-methyladenosine-3'-phosphate
  modified_base 19: mod_base = OTHER; note = 2'-O-methylguanosine-3'-phosphate
  modified_base 20: mod_base = OTHER; note = 2'-O-methyladenosine-3'-phosphate
  modified_base 21: mod_base = OTHER; note = 2'-O-methyluridine-3'-phosphate N-[tris(GalNAc-alkyl)-amidodecanoyl)]-4-hydroxyprolinol (Hyp-(GalNAc-alkyl)3)
gggcactttcttgtctgagat

SEQ ID NO: 7005 - RNA, 21 nt, synthetic construct
  source 1..21: mol_type = other RNA
  modified_base 1: mod_base = OTHER; note = 2'-O-methylguanosine-3'-phosphorothioate
  modified_base 2: mod_base = OTHER; note = 2'-O-methylguanosine-3'-phosphorothioate
  modified_base 3: mod_base = OTHER; note = 2'-O-methylcytidine-3'-phosphate
  modified_base 4: mod_base = OTHER; note = 2'-O-methyladenosine-3'-phosphate
  modified_base 5: mod_base = OTHER; note = 2'-O-methylcytidine-3'-phosphate
  modified_base 6: mod_base = OTHER; note = 2'-O-methyluridine-3'-phosphate
  modified_base 7: mod_base = OTHER; note = 2'-O-methyluridine-3'-phosphate
  modified_base 8: mod_base = OTHER; note = 2'-O-methyluridine-3'-phosphate
  modified_base 9: mod_base = OTHER; note = 2'-fluorocytidine-3'-phosphate
  modified_base 10: mod_base = OTHER; note = 2'-fluorouridine-3'-phosphate
  modified_base 11: mod_base = OTHER; note = 2'-fluorouridine-3'-phosphate
  modified_base 12: mod_base = OTHER; note = 2'-O-methylguanosine-3'-phosphate
  modified_base 13: mod_base = OTHER; note = 2'-O-methyluridine-3'-phosphate
  modified_base 14: mod_base = OTHER; note = 2'-O-methylcytidine-3'-phosphate
  modified_base 15: mod_base = OTHER; note = 2'-O-methyluridine-3'-phosphate
  modified_base 16: mod_base = OTHER; note = 2'-O-methylguanosine-3'-phosphate
  modified_base 17: mod_base = OTHER; note = 2'-O-methyladenosine-3'-phosphate
  modified_base 18: mod_base = OTHER; note = 2'-O-methylguanosine-3'-phosphate
  modified_base 19: mod_base = OTHER; note = 2'-O-methyladenosine-3'-phosphate
  modified_base 20: mod_base = OTHER; note = 2'-O-methylcytidine-3'-phosphate
  modified_base 21: mod_base = OTHER; note = 2'-O-methyluridine-3'-phosphate N-[tris(GalNAc-alkyl)-amidodecanoyl)]-4-hydroxyprolinol (Hyp-(GalNAc-alkyl)3)
ggcactttcttgtctgagact

SEQ ID NO: 7006 - RNA, 21 nt, synthetic construct
  source 1..21: mol_type = other RNA
  modified_base 1: mod_base = OTHER; note = 2'-O-methylguanosine-3'-phosphorothioate
  modified_base 2: mod_base = OTHER; note = 2'-O-methylcytidine-3'-phosphorothioate
  modified_base 3: mod_base = OTHER; note = 2'-O-methyladenosine-3'-phosphate
  modified_base 4: mod_base = OTHER; note = 2'-O-methylcytidine-3'-phosphate
  modified_base 5: mod_base = OTHER; note = 2'-O-methyluridine-3'-phosphate
  modified_base 6: mod_base = OTHER; note = 2'-O-methyluridine-3'-phosphate
  modified_base 7: mod_base = OTHER; note = 2'-O-methyluridine-3'-phosphate
  modified_base 8: mod_base = OTHER; note = 2'-O-methylcytidine-3'-phosphate
  modified_base 9: mod_base = OTHER; note = 2'-fluorouridine-3'-phosphate
  modified_base 10: mod_base = OTHER; note = 2'-fluorouridine-3'-phosphate
  modified_base 11: mod_base = OTHER; note = 2'-fluoroguanosine-3'-phosphate
  modified_base 12: mod_base = OTHER; note = 2'-O-methyluridine-3'-phosphate
  modified_base 13: mod_base = OTHER; note = 2'-O-methylcytidine-3'-phosphate
  modified_base 14: mod_base = OTHER; note = 2'-O-methyluridine-3'-phosphate
  modified_base 15: mod_base = OTHER; note = 2'-O-methylguanosine-3'-phosphate
  modified_base 16: mod_base = OTHER; note = 2'-O-methyladenosine-3'-phosphate
  modified_base 17: mod_base = OTHER; note = 2'-O-methylguanosine-3'-phosphate
  modified_base 18: mod_base = OTHER; note = 2'-O-methyladenosine-3'-phosphate
  modified_base 19: mod_base = OTHER; note = 2'-O-methylcytidine-3'-phosphate
  modified_base 20: mod_base = OTHER; note = 2'-O-methyluridine-3'-phosphate
  modified_base 21: mod_base = OTHER; note = 2'-O-methyluridine-3'-phosphate N-[tris(GalNAc-alkyl)-amidodecanoyl)]-4-hydroxyprolinol (Hyp-(GalNAc-alkyl)3)
gcactttcttgtctgagactt

SEQ ID NO: 7007 - RNA, 21 nt, synthetic construct
  source 1..21: mol_type = other RNA
  modified_base 1: mod_base = OTHER; note = 2'-O-methylcytidine-3'-phosphorothioate
  modified_base 2: mod_base = OTHER; note = 2'-O-methyladenosine-3'-phosphorothioate
  modified_base 3: mod_base = OTHER; note = 2'-O-methylcytidine-3'-phosphate
  modified_base 4: mod_base = OTHER; note = 2'-O-methyluridine-3'-phosphate
  modified_base 5: mod_base = OTHER; note = 2'-O-methyluridine-3'-phosphate
  modified_base 6: mod_base = OTHER; note = 2'-O-methyluridine-3'-phosphate
  modified_base 7: mod_base = OTHER; note = 2'-O-methylcytidine-3'-phosphate
  modified_base 8: mod_base = OTHER; note = 2'-O-methyluridine-3'-phosphate
  modified_base 9: mod_base = OTHER; note = 2'-fluorouridine-3'-phosphate
  modified_base 10: mod_base = OTHER; note = 2'-fluoroguanosine-3'-phosphate
  modified_base 11: mod_base = OTHER; note = 2'-fluorouridine-3'-phosphate
  modified_base 12: mod_base = OTHER; note = 2'-O-methylcytidine-3'-phosphate
  modified_base 13: mod_base = OTHER; note = 2'-O-methyluridine-3'-phosphate
  modified_base 14: mod_base = OTHER; note = 2'-O-methylguanosine-3'-phosphate
  modified_base 15: mod_base = OTHER; note = 2'-O-methyladenosine-3'-phosphate
  modified_base 16: mod_base = OTHER; note = 2'-O-methylguanosine-3'-phosphate
  modified_base 17: mod_base = OTHER; note = 2'-O-methyladenosine-3'-phosphate
  modified_base 18: mod_base = OTHER; note = 2'-O-methylcytidine-3'-phosphate
  modified_base 19: mod_base = OTHER; note = 2'-O-methyluridine-3'-phosphate
  modified_base 20: mod_base = OTHER; note = 2'-O-methylcytidine-3'-phosphate
  modified_base 21: mod_base = OTHER; note = 2'-O-methyluridine-3'-phosphate N-[tris(GalNAc-alkyl)-amidodecanoyl)]-4-hydroxyprolinol (Hyp-(GalNAc-alkyl)3)
cactttcttgtctgagactct

SEQ ID NO: 7008 - RNA, 21 nt, synthetic construct
  source 1..21: mol_type = other RNA
  modified_base 1: mod_base = OTHER; note = 2'-O-methyladenosine-3'-phosphorothioate
  modified_base 2: mod_base = OTHER; note = 2'-O-methylcytidine-3'-phosphorothioate
  modified_base 3: mod_base = OTHER; note = 2'-O-methyluridine-3'-phosphate
  modified_base 4: mod_base = OTHER; note = 2'-O-methyluridine-3'-phosphate
  modified_base 5: mod_base = OTHER; note = 2'-O-methyluridine-3'-phosphate
  modified_base 6: mod_base = OTHER; note = 2'-O-methylcytidine-3'-phosphate
  modified_base 7: mod_base = OTHER; note = 2'-O-methyluridine-3'-phosphate
  modified_base 8: mod_base = OTHER; note = 2'-O-methyluridine-3'-phosphate
  modified_base 9: mod_base = OTHER; note = 2'-fluoroguanosine-3'-phosphate
  modified_base 10: mod_base = OTHER; note = 2'-fluorouridine-3'-phosphate
  modified_base 11: mod_base = OTHER; note = 2'-fluorocytidine-3'-phosphate
  modified_base 12: mod_base = OTHER; note = 2'-O-methyluridine-3'-phosphate
  modified_base 13: mod_base = OTHER; note = 2'-O-methylguanosine-3'-phosphate
  modified_base 14: mod_base = OTHER; note = 2'-O-methyladenosine-3'-phosphate
  modified_base 15: mod_base = OTHER; note = 2'-O-methylguanosine-3'-phosphate
  modified_base 16: mod_base = OTHER; note = 2'-O-methyladenosine-3'-phosphate
  modified_base 17: mod_base = OTHER; note = 2'-O-methylcytidine-3'-phosphate
  modified_base 18: mod_base = OTHER; note = 2'-O-methyluridine-3'-phosphate
  modified_base 19: mod_base = OTHER; note = 2'-O-methylcytidine-3'-phosphate
  modified_base 20: mod_base = OTHER; note = 2'-O-methyluridine-3'-phosphate
  modified_base 21: mod_base = OTHER; note = 2'-O-methyluridine-3'-phosphate N-[tris(GalNAc-alkyl)-amidodecanoyl)]-4-hydroxyprolinol (Hyp-(GalNAc-alkyl)3)
actttcttgtctgagactctt

SEQ ID NO: 7009 - RNA, 21 nt, synthetic construct
  source 1..21: mol_type = other RNA
  modified_base 1: mod_base = OTHER; note = 2'-O-methylcytidine-3'-phosphorothioate
  modified_base 2: mod_base = OTHER; note = 2'-O-methyluridine-3'-phosphorothioate
  modified_base 3: mod_base = OTHER; note = 2'-O-methyluridine-3'-phosphate
  modified_base 4: mod_base = OTHER; note = 2'-O-methyluridine-3'-phosphate
  modified_base 5: mod_base = OTHER; note = 2'-O-methylcytidine-3'-phosphate
  modified_base 6: mod_base = OTHER; note = 2'-O-methyluridine-3'-phosphate
  modified_base 7: mod_base = OTHER; note = 2'-O-methyluridine-3'-phosphate
  modified_base 8: mod_base = OTHER; note = 2'-O-methylguanosine-3'-phosphate
  modified_base 9: mod_base = OTHER; note = 2'-fluorouridine-3'-phosphate
  modified_base 10: mod_base = OTHER; note = 2'-fluorocytidine-3'-phosphate
  modified_base 11: mod_base = OTHER; note = 2'-fluorouridine-3'-phosphate
  modified_base 12: mod_base = OTHER; note = 2'-O-methylguanosine-3'-phosphate
  modified_base 13: mod_base = OTHER; note = 2'-O-methyladenosine-3'-phosphate
  modified_base 14: mod_base = OTHER; note = 2'-O-methylguanosine-3'-phosphate
  modified_base 15: mod_base = OTHER; note = 2'-O-methyladenosine-3'-phosphate
  modified_base 16: mod_base = OTHER; note = 2'-O-methylcytidine-3'-phosphate
  modified_base 17: mod_base = OTHER; note = 2'-O-methyluridine-3'-phosphate
  modified_base 18: mod_base = OTHER; note = 2'-O-methylcytidine-3'-phosphate
  modified_base 19: mod_base = OTHER; note = 2'-O-methyluridine-3'-phosphate
  modified_base 20: mod_base = OTHER; note = 2'-O-methylguanosine-3'-phosphate
  modified_base 21: mod_base = OTHER; note = 2'-O-methyluridine-3'-phosphate N-[tris(GalNAc-alkyl)-amidodecanoyl)]-4-hydroxyprolinol (Hyp-(GalNAc-alkyl)3)
ctttcttgtctgagactctgt

SEQ ID NO: 7010 - RNA, 21 nt, synthetic construct
  source 1..21: mol_type = other RNA
  modified_base 1: mod_base = OTHER; note = 2'-O-methyluridine-3'-phosphorothioate
  modified_base 2: mod_base = OTHER; note = 2'-O-methyluridine-3'-phosphorothioate
  modified_base 3: mod_base = OTHER; note = 2'-O-methyluridine-3'-phosphate
  modified_base 4: mod_base = OTHER; note = 2'-O-methylcytidine-3'-phosphate
  modified_base 5: mod_base = OTHER; note = 2'-O-methyluridine-3'-phosphate
  modified_base 6: mod_base = OTHER; note = 2'-O-methyluridine-3'-phosphate
  modified_base 7: mod_base = OTHER; note = 2'-O-methylguanosine-3'-phosphate
  modified_base 8: mod_base = OTHER; note = 2'-O-methyluridine-3'-phosphate
  modified_base 9: mod_base = OTHER; note = 2'-fluorocytidine-3'-phosphate
  modified_base 10: mod_base = OTHER; note = 2'-fluorouridine-3'-phosphate
  modified_base 11: mod_base = OTHER; note = 2'-fluoroguanosine-3'-phosphate
  modified_base 12: mod_base = OTHER; note = 2'-O-methyladenosine-3'-phosphate
  modified_base 13: mod_base = OTHER; note = 2'-O-methylguanosine-3'-phosphate
  modified_base 14: mod_base = OTHER; note = 2'-O-methyladenosine-3'-phosphate
  modified_base 15: mod_base = OTHER; note = 2'-O-methylcytidine-3'-phosphate
  modified_base 16: mod_base = OTHER; note = 2'-O-methyluridine-3'-phosphate
  modified_base 17: mod_base = OTHER; note = 2'-O-methylcytidine-3'-phosphate
  modified_base 18: mod_base = OTHER; note = 2'-O-methyluridine-3'-phosphate
  modified_base 19: mod_base = OTHER; note = 2'-O-methylguanosine-3'-phosphate
  modified_base 20: mod_base = OTHER; note = 2'-O-methylguanosine-3'-phosphate
  modified_base 21: mod_base = OTHER; note = 2'-O-methyluridine-3'-phosphate N-[tris(GalNAc-alkyl)-amidodecanoyl)]-4-hydroxyprolinol (Hyp-(GalNAc-alkyl)3)
tttcttgtctgagactctggt

SEQ ID NO: 7011 - RNA, 21 nt, synthetic construct
  source 1..21: mol_type = other RNA
  modified_base 1: mod_base = OTHER; note = 2'-O-methyluridine-3'-phosphorothioate
  modified_base 2: mod_base = OTHER; note = 2'-O-methyluridine-3'-phosphorothioate
  modified_base 3: mod_base = OTHER; note = 2'-O-methylcytidine-3'-phosphate
  modified_base 4: mod_base = OTHER; note = 2'-O-methyluridine-3'-phosphate
  modified_base 5: mod_base = OTHER; note = 2'-O-methyluridine-3'-phosphate
  modified_base 6: mod_base = OTHER; note = 2'-O-methylguanosine-3'-phosphate
  modified_base 7: mod_base = OTHER; note = 2'-O-methyluridine-3'-phosphate
  modified_base 8: mod_base = OTHER; note = 2'-O-methylcytidine-3'-phosphate
  modified_base 9: mod_base = OTHER; note = 2'-fluorouridine-3'-phosphate
  modified_base 10: mod_base = OTHER; note = 2'-fluoroguanosine-3'-phosphate
  modified_base 11: mod_base = OTHER; note = 2'-fluoroadenosine-3'-phosphate
  modified_base 12: mod_base = OTHER; note = 2'-O-methylguanosine-3'-phosphate
  modified_base 13: mod_base = OTHER; note = 2'-O-methyladenosine-3'-phosphate
  modified_base 14: mod_base = OTHER; note = 2'-O-methylcytidine-3'-phosphate
  modified_base 15: mod_base = OTHER; note = 2'-O-methyluridine-3'-phosphate
  modified_base 16: mod_base = OTHER; note = 2'-O-methylcytidine-3'-phosphate
  modified_base 17: mod_base = OTHER; note = 2'-O-methyluridine-3'-phosphate
  modified_base 18: mod_base = OTHER; note = 2'-O-methylguanosine-3'-phosphate
  modified_base 19: mod_base = OTHER; note = 2'-O-methylguanosine-3'-phosphate
  modified_base 20: mod_base = OTHER; note = 2'-O-methylcytidine-3'-phosphate
  modified_base 21: mod_base = OTHER; note = 2'-O-methyluridine-3'-phosphate N-[tris(GalNAc-alkyl)-amidodecanoyl)]-4-hydroxyprolinol (Hyp-(GalNAc-alkyl)3)
ttcttgtctgagactctggct

SEQ ID NO: 7012 - RNA, 21 nt, synthetic construct
  source 1..21: mol_type = other RNA
  modified_base 1: mod_base = OTHER; note = 2'-O-methyluridine-3'-phosphorothioate
  modified_base 2: mod_base = OTHER; note = 2'-O-methylcytidine-3'-phosphorothioate
  modified_base 3: mod_base = OTHER; note = 2'-O-methyluridine-3'-phosphate
  modified_base 4: mod_base = OTHER; note = 2'-O-methyluridine-3'-phosphate
  modified_base 5: mod_base = OTHER; note = 2'-O-methylguanosine-3'-phosphate
  modified_base 6: mod_base = OTHER; note = 2'-O-methyluridine-3'-phosphate
  modified_base 7: mod_base = OTHER; note = 2'-O-methylcytidine-3'-phosphate
  modified_base 8: mod_base = OTHER; note = 2'-O-methyluridine-3'-phosphate
  modified_base 9: mod_base = OTHER; note = 2'-fluoroguanosine-3'-phosphate
  modified_base 10: mod_base = OTHER; note = 2'-fluoroadenosine-3'-phosphate
  modified_base 11: mod_base = OTHER; note = 2'-fluoroguanosine-3'-phosphate
  modified_base 12: mod_base = OTHER; note = 2'-O-methyladenosine-3'-phosphate
  modified_base 13: mod_base = OTHER; note = 2'-O-methylcytidine-3'-phosphate
  modified_base 14: mod_base = OTHER; note = 2'-O-methyluridine-3'-phosphate
  modified_base 15: mod_base = OTHER; note = 2'-O-methylcytidine-3'-phosphate
  modified_base 16: mod_base = OTHER; note = 2'-O-methyluridine-3'-phosphate
  modified_base 17: mod_base = OTHER; note = 2'-O-methylguanosine-3'-phosphate
  modified_base 18: mod_base = OTHER; note = 2'-O-methylguanosine-3'-phosphate
  modified_base 19: mod_base = OTHER; note = 2'-O-methylcytidine-3'-phosphate
  modified_base 20: mod_base = OTHER; note = 2'-O-methyluridine-3'-phosphate
  modified_base 21: mod_base = OTHER; note = 2'-O-methyluridine-3'-phosphate N-[tris(GalNAc-alkyl)-amidodecanoyl)]-4-hydroxyprolinol (Hyp-(GalNAc-alkyl)3)
tcttgtctgagactctggctt

SEQ ID NO: 7013 - RNA, 21 nt, synthetic construct
  source 1..21: mol_type = other RNA
  modified_base 1: mod_base = OTHER; note = 2'-O-methylcytidine-3'-phosphorothioate
  modified_base 2: mod_base = OTHER; note = 2'-O-methyluridine-3'-phosphorothioate
  modified_base 3: mod_base = OTHER; note = 2'-O-methyluridine-3'-phosphate
  modified_base 4: mod_base = OTHER; note = 2'-O-methylguanosine-3'-phosphate
  modified_base 5: mod_base = OTHER; note = 2'-O-methyluridine-3'-phosphate
  modified_base 6: mod_base = OTHER; note = 2'-O-methylcytidine-3'-phosphate
  modified_base 7: mod_base = OTHER; note = 2'-O-methyluridine-3'-phosphate
  modified_base 8: mod_base = OTHER; note = 2'-O-methylguanosine-3'-phosphate
  modified_base 9: mod_base = OTHER; note = 2'-fluoroadenosine-3'-phosphate
  modified_base 10: mod_base = OTHER; note = 2'-fluoroguanosine-3'-phosphate
  modified_base 11: mod_base = OTHER; note = 2'-fluoroadenosine-3'-phosphate
  modified_base 12: mod_base = OTHER; note = 2'-O-methylcytidine-3'-phosphate
  modified_base 13: mod_base = OTHER; note = 2'-O-methyluridine-3'-phosphate
  modified_base 14: mod_base = OTHER; note = 2'-O-methylcytidine-3'-phosphate
  modified_base 15: mod_base = OTHER; note = 2'-O-methyluridine-3'-phosphate
  modified_base 16: mod_base = OTHER; note = 2'-O-methylguanosine-3'-phosphate
  modified_base 17: mod_base = OTHER; note = 2'-O-methylguanosine-3'-phosphate
  modified_base 18: mod_base = OTHER; note = 2'-O-methylcytidine-3'-phosphate
  modified_base 19: mod_base = OTHER; note = 2'-O-methyluridine-3'-phosphate
  modified_base 20: mod_base = OTHER; note = 2'-O-methyluridine-3'-phosphate
  modified_base 21: mod_base = OTHER; note = 2'-O-methyluridine-3'-phosphate N-[tris(GalNAc-alkyl)-amidodecanoyl)]-4-hydroxyprolinol (Hyp-(GalNAc-alkyl)3)
cttgtctgagactctggcttt

SEQ ID NO: 7014 - RNA, 21 nt, synthetic construct
  source 1..21: mol_type = other RNA
  modified_base 1: mod_base = OTHER; note = 2'-O-methyluridine-3'-phosphorothioate
  modified_base 2: mod_base = OTHER; note = 2'-O-methyladenosine-3'-phosphorothioate
  modified_base 3: mod_base = OTHER; note = 2'-O-methyluridine-3'-phosphate
  modified_base 4: mod_base = OTHER; note = 2'-O-methyluridine-3'-phosphate
  modified_base 5: mod_base = OTHER; note = 2'-O-methylcytidine-3'-phosphate
  modified_base 6: mod_base = OTHER; note = 2'-O-methylcytidine-3'-phosphate
  modified_base 7: mod_base = OTHER; note = 2'-O-methyladenosine-3'-phosphate
  modified_base 8: mod_base = OTHER; note = 2'-O-methylguanosine-3'-phosphate
  modified_base 9: mod_base = OTHER; note = 2'-fluoroguanosine-3'-phosphate
  modified_base 10: mod_base = OTHER; note = 2'-fluorouridine-3'-phosphate
  modified_base 11: mod_base = OTHER; note = 2'-fluorouridine-3'-phosphate
  modified_base 12: mod_base = OTHER; note = 2'-O-methylguanosine-3'-phosphate
  modified_base 13: mod_base = OTHER; note = 2'-O-methylguanosine-3'-phosphate
  modified_base 14: mod_base = OTHER; note = 2'-O-methylcytidine-3'-phosphate
  modified_base 15: mod_base = OTHER; note = 2'-O-methyluridine-3'-phosphate
  modified_base 16: mod_base = OTHER; note = 2'-O-methylguanosine-3'-phosphate
  modified_base 17: mod_base = OTHER; note = 2'-O-methyladenosine-3'-phosphate
  modified_base 18: mod_base = OTHER; note = 2'-O-methyluridine-3'-phosphate
  modified_base 19: mod_base = OTHER; note = 2'-O-methylguanosine-3'-phosphate
  modified_base 20: mod_base = OTHER; note = 2'-O-methyluridine-3'-phosphate
  modified_base 21: mod_base = OTHER; note = 2'-O-methyluridine-3'-phosphate N-[tris(GalNAc-alkyl)-amidodecanoyl)]-4-hydroxyprolinol (Hyp-(GalNAc-alkyl)3)
tattccaggttggctgatgtt

SEQ ID NO: 7015 - RNA, 21 nt, synthetic construct
  source 1..21: mol_type = other RNA
  modified_base 1: mod_base = OTHER; note = 2'-O-methyladenosine-3'-phosphorothioate
  modified_base 2: mod_base = OTHER; note = 2'-O-methyluridine-3'-phosphorothioate
  modified_base 3: mod_base = OTHER; note = 2'-O-methyluridine-3'-phosphate
  modified_base 4: mod_base = OTHER; note = 2'-O-methylcytidine-3'-phosphate
  modified_base 5: mod_base = OTHER; note = 2'-O-methylcytidine-3'-phosphate
  modified_base 6: mod_base = OTHER; note = 2'-O-methyladenosine-3'-phosphate
  modified_base 7: mod_base = OTHER; note = 2'-O-methylguanosine-3'-phosphate
  modified_base 8: mod_base = OTHER; note = 2'-O-methylguanosine-3'-phosphate
  modified_base 9: mod_base = OTHER; note = 2'-fluorouridine-3'-phosphate
  modified_base 10: mod_base = OTHER; note = 2'-fluorouridine-3'-phosphate
  modified_base 11: mod_base = OTHER; note = 2'-fluoroguanosine-3'-phosphate
  modified_base 12: mod_base = OTHER; note = 2'-O-methylguanosine-3'-phosphate
  modified_base 13: mod_base = OTHER; note = 2'-O-methylcytidine-3'-phosphate
  modified_base 14: mod_base = OTHER; note = 2'-O-methyluridine-3'-phosphate
  modified_base 15: mod_base = OTHER; note = 2'-O-methylguanosine-3'-phosphate
  modified_base 16: mod_base = OTHER; note = 2'-O-methyladenosine-3'-phosphate
  modified_base 17: mod_base = OTHER; note = 2'-O-methyluridine-3'-phosphate
  modified_base 18: mod_base = OTHER; note = 2'-O-methylguanosine-3'-phosphate
  modified_base 19: mod_base = OTHER; note = 2'-O-methyluridine-3'-phosphate
  modified_base 20: mod_base = OTHER; note = 2'-O-methylguanosine-3'-phosphate
  modified_base 21: mod_base = OTHER; note = 2'-O-methyluridine-3'-phosphate N-[tris(GalNAc-alkyl)-amidodecanoyl)]-4-hydroxyprolinol (Hyp-(GalNAc-alkyl)3)
attccaggttggctgatgtgt

SEQ ID NO: 7016 - RNA, 21 nt, synthetic construct
  source 1..21: mol_type = other RNA
  modified_base 1: mod_base = OTHER; note = 2'-O-methyluridine-3'-phosphorothioate
  modified_base 2: mod_base = OTHER; note = 2'-O-methyluridine-3'-phosphorothioate
  modified_base 3: mod_base = OTHER; note = 2'-O-methylcytidine-3'-phosphate
  modified_base 4: mod_base = OTHER; note = 2'-O-methylcytidine-3'-phosphate
  modified_base 5: mod_base = OTHER; note = 2'-O-methyladenosine-3'-phosphate
  modified_base 6: mod_base = OTHER; note = 2'-O-methylguanosine-3'-phosphate
  modified_base 7: mod_base = OTHER; note = 2'-O-methylguanosine-3'-phosphate
  modified_base 8: mod_base = OTHER; note = 2'-O-methyluridine-3'-phosphate
  modified_base 9: mod_base = OTHER; note = 2'-fluorouridine-3'-phosphate
  modified_base 10: mod_base = OTHER; note = 2'-fluoroguanosine-3'-phosphate
  modified_base 11: mod_base = OTHER; note = 2'-fluoroguanosine-3'-phosphate
  modified_base 12: mod_base = OTHER; note = 2'-O-methylcytidine-3'-phosphate
  modified_base 13: mod_base = OTHER; note = 2'-O-methyluridine-3'-phosphate
  modified_base 14: mod_base = OTHER; note = 2'-O-methylguanosine-3'-phosphate
  modified_base 15: mod_base = OTHER; note = 2'-O-methyladenosine-3'-phosphate
  modified_base 16: mod_base = OTHER; note = 2'-O-methyluridine-3'-phosphate
  modified_base 17: mod_base = OTHER; note = 2'-O-methylguanosine-3'-phosphate
  modified_base 18: mod_base = OTHER; note = 2'-O-methyluridine-3'-phosphate
  modified_base 19: mod_base = OTHER; note = 2'-O-methylguanosine-3'-phosphate
  modified_base 20: mod_base = OTHER; note = 2'-O-methyluridine-3'-phosphate
  modified_base 21: mod_base = OTHER; note = 2'-O-methyluridine-3'-phosphate N-[tris(GalNAc-alkyl)-amidodecanoyl)]-4-hydroxyprolinol (Hyp-(GalNAc-alkyl)3)
ttccaggttggctgatgtgtt

SEQ ID NO: 7017 - RNA, 21 nt, synthetic construct
  source 1..21: mol_type = other RNA
  modified_base 1: mod_base = OTHER; note = 2'-O-methyluridine-3'-phosphorothioate
  modified_base 2: mod_base = OTHER; note = 2'-O-methylcytidine-3'-phosphorothioate
  modified_base 3: mod_base = OTHER; note = 2'-O-methylcytidine-3'-phosphate
  modified_base 4: mod_base = OTHER; note = 2'-O-methyladenosine-3'-phosphate
  modified_base 5: mod_base = OTHER; note = 2'-O-methylguanosine-3'-phosphate
  modified_base 6: mod_base = OTHER; note = 2'-O-methylguanosine-3'-phosphate
  modified_base 7: mod_base = OTHER; note = 2'-O-methyluridine-3'-phosphate
  modified_base 8: mod_base = OTHER; note = 2'-O-methyluridine-3'-phosphate
  modified_base 9: mod_base = OTHER; note = 2'-fluoroguanosine-3'-phosphate
  modified_base 10: mod_base = OTHER; note = 2'-fluoroguanosine-3'-phosphate
  modified_base 11: mod_base = OTHER; note = 2'-fluorocytidine-3'-phosphate
  modified_base 12: mod_base = OTHER; note = 2'-O-methyluridine-3'-phosphate
  modified_base 13: mod_base = OTHER; note = 2'-O-methylguanosine-3'-phosphate
  modified_base 14: mod_base = OTHER; note = 2'-O-methyladenosine-3'-phosphate
  modified_base 15: mod_base = OTHER; note = 2'-O-methyluridine-3'-phosphate
  modified_base 16: mod_base = OTHER; note = 2'-O-methylguanosine-3'-phosphate
  modified_base 17: mod_base = OTHER; note = 2'-O-methyluridine-3'-phosphate
  modified_base 18: mod_base = OTHER; note = 2'-O-methylguanosine-3'-phosphate
  modified_base 19: mod_base = OTHER; note = 2'-O-methyluridine-3'-phosphate
  modified_base 20: mod_base = OTHER; note = 2'-O-methyluridine-3'-phosphate
  modified_base 21: mod_base = OTHER; note = 2'-O-methyluridine-3'-phosphate N-[tris(GalNAc-alkyl)-amidodecanoyl)]-4-hydroxyprolinol (Hyp-(GalNAc-alkyl)3)
tccaggttggctgatgtgttt

SEQ ID NO: 7018 - RNA, 21 nt, synthetic construct
  source 1..21: mol_type = other RNA
  modified_base 1: mod_base = OTHER; note = 2'-O-methylcytidine-3'-phosphorothioate
  modified_base 2: mod_base = OTHER; note = 2'-O-methylcytidine-3'-phosphorothioate
  modified_base 3: mod_base = OTHER; note = 2'-O-methyladenosine-3'-phosphate
  modified_base 4: mod_base = OTHER; note = 2'-O-methylguanosine-3'-phosphate
  modified_base 5: mod_base = OTHER; note = 2'-O-methylguanosine-3'-phosphate
  modified_base 6: mod_base = OTHER; note = 2'-O-methyluridine-3'-phosphate
  modified_base 7: mod_base = OTHER; note = 2'-O-methyluridine-3'-phosphate
  modified_base 8: mod_base = OTHER; note = 2'-O-methylguanosine-3'-phosphate
  modified_base 9: mod_base = OTHER; note = 2'-fluoroguanosine-3'-phosphate
  modified_base 10: mod_base = OTHER; note = 2'-fluorocytidine-3'-phosphate
  modified_base 11: mod_base = OTHER; note = 2'-fluorouridine-3'-phosphate
  modified_base 12: mod_base = OTHER; note = 2'-O-methylguanosine-3'-phosphate
  modified_base 13: mod_base = OTHER; note = 2'-O-methyladenosine-3'-phosphate
  modified_base 14: mod_base = OTHER; note = 2'-O-methyluridine-3'-phosphate
  modified_base 15: mod_base = OTHER; note = 2'-O-methylguanosine-3'-phosphate
  modified_base 16: mod_base = OTHER; note = 2'-O-methyluridine-3'-phosphate
  modified_base 17: mod_base = OTHER; note = 2'-O-methylguanosine-3'-phosphate
  modified_base 18: mod_base = OTHER; note = 2'-O-methyluridine-3'-phosphate
  modified_base 19: mod_base = OTHER; note = 2'-O-methyluridine-3'-phosphate
  modified_base 20: mod_base = OTHER; note = 2'-O-methylguanosine-3'-phosphate
  modified_base 21: mod_base = OTHER; note = 2'-O-methyluridine-3'-phosphate N-[tris(GalNAc-alkyl)-amidodecanoyl)]-4-hydroxyprolinol (Hyp-(GalNAc-alkyl)3)
ccaggttggctgatgtgttgt

SEQ ID NO: 7019 - RNA, 21 nt, synthetic construct
  source 1..21: mol_type = other RNA
  modified_base 1: mod_base = OTHER; note = 2'-O-methylcytidine-3'-phosphorothioate
  modified_base 2: mod_base = OTHER; note = 2'-O-methyladenosine-3'-phosphorothioate
  modified_base 3: mod_base = OTHER; note = 2'-O-methylguanosine-3'-phosphate
  modified_base 4: mod_base = OTHER; note = 2'-O-methylguanosine-3'-phosphate
  modified_base 5: mod_base = OTHER; note = 2'-O-methyluridine-3'-phosphate
  modified_base 6: mod_base = OTHER; note = 2'-O-methyluridine-3'-phosphate
  modified_base 7: mod_base = OTHER; note = 2'-O-methylguanosine-3'-phosphate
  modified_base 8: mod_base = OTHER; note = 2'-O-methylguanosine-3'-phosphate
  modified_base 9: mod_base = OTHER; note = 2'-fluorocytidine-3'-phosphate
  modified_base 10: mod_base = OTHER; note = 2'-fluorouridine-3'-phosphate
  modified_base 11: mod_base = OTHER; note = 2'-fluoroguanosine-3'-phosphate
  modified_base 12: mod_base = OTHER; note = 2'-O-methyladenosine-3'-phosphate
  modified_base 13: mod_base = OTHER; note = 2'-O-methyluridine-3'-phosphate
  modified_base 14: mod_base = OTHER; note = 2'-O-methylguanosine-3'-phosphate
  modified_base 15: mod_base = OTHER; note = 2'-O-methyluridine-3'-phosphate
  modified_base 16: mod_base = OTHER; note = 2'-O-methylguanosine-3'-phosphate
  modified_base 17: mod_base = OTHER; note = 2'-O-methyluridine-3'-phosphate
  modified_base 18: mod_base = OTHER; note = 2'-O-methyluridine-3'-phosphate
  modified_base 19: mod_base = OTHER; note = 2'-O-methylguanosine-3'-phosphate
  modified_base 20: mod_base = OTHER; note = 2'-O-methylguanosine-3'-phosphate
  modified_base 21: mod_base = OTHER; note = 2'-O-methyluridine-3'-phosphate N-[tris(GalNAc-alkyl)-amidodecanoyl)]-4-hydroxyprolinol (Hyp-(GalNAc-alkyl)3)
caggttggctgatgtgttggt

SEQ ID NO: 7020 - RNA, 21 nt, synthetic construct
  source 1..21: mol_type = other RNA
  modified_base 1: mod_base = OTHER; note = 2'-O-methylguanosine-3'-phosphorothioate
  modified_base 2: mod_base = OTHER; note = 2'-O-methyladenosine-3'-phosphorothioate
  modified_base 3: mod_base = OTHER; note = 2'-O-methyluridine-3'-phosphate
  modified_base 4: mod_base = OTHER; note = 2'-O-methyluridine-3'-phosphate
  modified_base 5: mod_base = OTHER; note = 2'-O-methyluridine-3'-phosphate
  modified_base 6: mod_base = OTHER; note = 2'-O-methylcytidine-3'-phosphate
  modified_base 7: mod_base = OTHER; note = 2'-O-methylcytidine-3'-phosphate
  modified_base 8: mod_base = OTHER; note = 2'-O-methyluridine-3'-phosphate
  modified_base 9: mod_base = OTHER; note = 2'-fluoroguanosine-3'-phosphate
  modified_base 10: mod_base = OTHER; note = 2'-fluorocytidine-3'-phosphate
  modified_base 11: mod_base = OTHER; note = 2'-fluorocytidine-3'-phosphate
  modified_base 12: mod_base = OTHER; note = 2'-O-methylcytidine-3'-phosphate
  modified_base 13: mod_base = OTHER; note = 2'-O-methyluridine-3'-phosphate
  modified_base 14: mod_base = OTHER; note = 2'-O-methyladenosine-3'-phosphate
  modified_base 15: mod_base = OTHER; note = 2'-O-methyladenosine-3'-phosphate
  modified_base 16: mod_base = OTHER; note = 2'-O-methylguanosine-3'-phosphate
  modified_base 17: mod_base = OTHER; note = 2'-O-methyluridine-3'-phosphate
  modified_base 18: mod_base = OTHER; note = 2'-O-methylcytidine-3'-phosphate
  modified_base 19: mod_base = OTHER; note = 2'-O-methylcytidine-3'-phosphate
  modified_base 20: mod_base = OTHER; note = 2'-O-methyluridine-3'-phosphate
  modified_base 21: mod_base = OTHER; note = 2'-O-methyluridine-3'-phosphate N-[tris(GalNAc-alkyl)-amidodecanoyl)]-4-hydroxyprolinol (Hyp-(GalNAc-alkyl)3)
gatttcctgccctaagtcctt

SEQ ID NO: 7021 - RNA, 21 nt, synthetic construct
  source 1..21: mol_type = other RNA
  modified_base 1: mod_base = OTHER; note = 2'-O-methyluridine-3'-phosphorothioate
  modified_base 2: mod_base = OTHER; note = 2'-O-methyluridine-3'-phosphorothioate
  modified_base 3: mod_base = OTHER; note = 2'-O-methyluridine-3'-phosphate
  modified_base 4: mod_base = OTHER; note = 2'-O-methylcytidine-3'-phosphate
  modified_base 5: mod_base = OTHER; note = 2'-O-methylcytidine-3'-phosphate
  modified_base 6: mod_base = OTHER; note = 2'-O-methyluridine-3'-phosphate
  modified_base 7: mod_base = OTHER; note = 2'-O-methylguanosine-3'-phosphate
  modified_base 8: mod_base = OTHER; note = 2'-O-methylcytidine-3'-phosphate
  modified_base 9: mod_base = OTHER; note = 2'-fluorocytidine-3'-phosphate
  modified_base 10: mod_base = OTHER; note = 2'-fluorocytidine-3'-phosphate
  modified_base 11: mod_base = OTHER; note = 2'-fluorouridine-3'-phosphate
  modified_base 12: mod_base = OTHER; note = 2'-O-methyladenosine-3'-phosphate
  modified_base 13: mod_base = OTHER; note = 2'-O-methyladenosine-3'-phosphate
  modified_base 14: mod_base = OTHER; note = 2'-O-methylguanosine-3'-phosphate
  modified_base 15: mod_base = OTHER; note = 2'-O-methyluridine-3'-phosphate
  modified_base 16: mod_base = OTHER; note = 2'-O-methylcytidine-3'-phosphate
  modified_base 17: mod_base = OTHER; note = 2'-O-methylcytidine-3'-phosphate
  modified_base 18: mod_base = OTHER; note = 2'-O-methyluridine-3'-phosphate
  modified_base 19: mod_base = OTHER; note = 2'-O-methylguanosine-3'-phosphate
  modified_base 20: mod_base = OTHER; note = 2'-O-methyluridine-3'-phosphate
  modified_base 21: mod_base = OTHER; note = 2'-O-methyluridine-3'-phosphate N-[tris(GalNAc-alkyl)-amidodecanoyl)]-4-hydroxyprolinol (Hyp-(GalNAc-alkyl)3)
tttcctgccctaagtcctgtt

SEQ ID NO: 7022 - RNA, 21 nt, synthetic construct
  source 1..21: mol_type = other RNA
  modified_base 1: mod_base = OTHER; note = 2'-O-methyladenosine-3'-phosphorothioate
  modified_base 2: mod_base = OTHER; note = 2'-O-methylguanosine-3'-phosphorothioate
  modified_base 3: mod_base = OTHER; note = 2'-O-methyladenosine-3'-phosphate
  modified_base 4: mod_base = OTHER; note = 2'-O-methyladenosine-3'-phosphate
  modified_base 5: mod_base = OTHER; note = 2'-O-methylguanosine-3'-phosphate
  modified_base 6: mod_base = OTHER; note = 2'-O-methyladenosine-3'-phosphate
  modified_base 7: mod_base = OTHER; note = 2'-O-methyluridine-3'-phosphate
  modified_base 8: mod_base = OTHER; note = 2'-O-methylguanosine-3'-phosphate
  modified_base 9: mod_base = OTHER; note = 2'-fluorouridine-3'-phosphate
  modified_base 10: mod_base = OTHER; note = 2'-fluorocytidine-3'-phosphate
  modified_base 11: mod_base = OTHER; note = 2'-fluoroadenosine-3'-phosphate
  modified_base 12: mod_base = OTHER; note = 2'-O-methylguanosine-3'-phosphate
  modified_base 13: mod_base = OTHER; note = 2'-O-methylguanosine-3'-phosphate
  modified_base 14: mod_base = OTHER; note = 2'-O-methylguanosine-3'-phosphate
  modified_base 15: mod_base = OTHER; note = 2'-O-methyladenosine-3'-phosphate
  modified_base 16: mod_base = OTHER; note = 2'-O-methylcytidine-3'-phosphate
  modified_base 17: mod_base = OTHER; note = 2'-O-methyluridine-3'-phosphate
  modified_base 18: mod_base = OTHER; note = 2'-O-methyladenosine-3'-phosphate
  modified_base 19: mod_base = OTHER; note = 2'-O-methylguanosine-3'-phosphate
  modified_base 20: mod_base = OTHER; note = 2'-O-methylguanosine-3'-phosphate
  modified_base 21: mod_base = OTHER; note = 2'-O-methyluridine-3'-phosphate N-[tris(GalNAc-alkyl)-amidodecanoyl)]-4-hydroxyprolinol (Hyp-(GalNAc-alkyl)3)
agaagatgtcagggactaggt

SEQ ID NO: 7023 - RNA, 21 nt, synthetic construct
  source 1..21: mol_type = other RNA
  modified_base 1: mod_base = OTHER; note = 2'-O-methylguanosine-3'-phosphorothioate
  modified_base 2: mod_base = OTHER; note = 2'-O-methyladenosine-3'-phosphorothioate
  modified_base 3: mod_base = OTHER; note = 2'-O-methyladenosine-3'-phosphate
  modified_base 4: mod_base = OTHER; note = 2'-O-methylguanosine-3'-phosphate
  modified_base 5: mod_base = OTHER; note = 2'-O-methyladenosine-3'-phosphate
  modified_base 6: mod_base = OTHER; note = 2'-O-methyluridine-3'-phosphate
  modified_base 7: mod_base = OTHER; note = 2'-O-methylguanosine-3'-phosphate
  modified_base 8: mod_base = OTHER; note = 2'-O-methyluridine-3'-phosphate
  modified_base 9: mod_base = OTHER; note = 2'-fluorocytidine-3'-phosphate
  modified_base 10: mod_base = OTHER; note = 2'-fluoroadenosine-3'-phosphate
  modified_base 11: mod_base = OTHER; note = 2'-fluoroguanosine-3'-phosphate
  modified_base 12: mod_base = OTHER; note = 2'-O-methylguanosine-3'-phosphate
  modified_base 13: mod_base = OTHER; note = 2'-O-methylguanosine-3'-phosphate
  modified_base 14: mod_base = OTHER; note = 2'-O-methyladenosine-3'-phosphate
  modified_base 15: mod_base = OTHER; note = 2'-O-methylcytidine-3'-phosphate
  modified_base 16: mod_base = OTHER; note = 2'-O-methyluridine-3'-phosphate
  modified_base 17: mod_base = OTHER; note = 2'-O-methyladenosine-3'-phosphate
  modified_base 18: mod_base = OTHER; note = 2'-O-methylguanosine-3'-phosphate
  modified_base 19: mod_base = OTHER; note = 2'-O-methylguanosine-3'-phosphate
  modified_base 20: mod_base = OTHER; note = 2'-O-methylguanosine-3'-phosphate
  modified_base 21: mod_base = OTHER; note = 2'-O-methyluridine-3'-phosphate N-[tris(GalNAc-alkyl)-amidodecanoyl)]-4-hydroxyprolinol (Hyp-(GalNAc-alkyl)3)
gaagatgtcagggactagggt

SEQ ID NO: 7024 - RNA, 21 nt, synthetic construct
  source 1..21: mol_type = other RNA
  modified_base 1: mod_base = OTHER; note = 2'-O-methyladenosine-3'-phosphorothioate
  modified_base 2: mod_base = OTHER; note = 2'-O-methyladenosine-3'-phosphorothioate
  modified_base 3: mod_base = OTHER; note = 2'-O-methylguanosine-3'-phosphate
  modified_base 4: mod_base = OTHER; note = 2'-O-methyladenosine-3'-phosphate
  modified_base 5: mod_base = OTHER; note = 2'-O-methyluridine-3'-phosphate
  modified_base 6: mod_base = OTHER; note = 2'-O-methylguanosine-3'-phosphate
  modified_base 7: mod_base = OTHER; note = 2'-O-methyluridine-3'-phosphate
  modified_base 8: mod_base = OTHER; note = 2'-O-methylcytidine-3'-phosphate
  modified_base 9: mod_base = OTHER; note = 2'-fluoroadenosine-3'-phosphate
  modified_base 10: mod_base = OTHER; note = 2'-fluoroguanosine-3'-phosphate
  modified_base 11: mod_base = OTHER; note = 2'-fluoroguanosine-3'-phosphate
  modified_base 12: mod_base = OTHER; note = 2'-O-methylguanosine-3'-phosphate
  modified_base 13: mod_base = OTHER; note = 2'-O-methyladenosine-3'-phosphate
  modified_base 14: mod_base = OTHER; note = 2'-O-methylcytidine-3'-phosphate
  modified_base 15: mod_base = OTHER; note = 2'-O-methyluridine-3'-phosphate
  modified_base 16: mod_base = OTHER; note = 2'-O-methyladenosine-3'-phosphate
  modified_base 17: mod_base = OTHER; note = 2'-O-methylguanosine-3'-phosphate
  modified_base 18: mod_base = OTHER; note = 2'-O-methylguanosine-3'-phosphate
  modified_base 19: mod_base = OTHER; note = 2'-O-methylguanosine-3'-phosphate
  modified_base 20: mod_base = OTHER; note = 2'-O-methyladenosine-3'-phosphate
  modified_base 21: mod_base = OTHER; note = 2'-O-methyluridine-3'-phosphate N-[tris(GalNAc-alkyl)-amidodecanoyl)]-4-hydroxyprolinol (Hyp-(GalNAc-alkyl)3)
aagatgtcagggactagggat

SEQ ID NO: 7025 - RNA, 21 nt, synthetic construct
  source 1..21: mol_type = other RNA
  modified_base 1: mod_base = OTHER; note = 2'-O-methyladenosine-3'-phosphorothioate
  modified_base 2: mod_base = OTHER; note = 2'-O-methylguanosine-3'-phosphorothioate
  modified_base 3: mod_base = OTHER; note = 2'-O-methyladenosine-3'-phosphate
  modified_base 4: mod_base = OTHER; note = 2'-O-methyluridine-3'-phosphate
  modified_base 5: mod_base = OTHER; note = 2'-O-methylguanosine-3'-phosphate
  modified_base 6: mod_base = OTHER; note = 2'-O-methyluridine-3'-phosphate
  modified_base 7: mod_base = OTHER; note = 2'-O-methylcytidine-3'-phosphate
  modified_base 8: mod_base = OTHER; note = 2'-O-methyladenosine-3'-phosphate
  modified_base 9: mod_base = OTHER; note = 2'-fluoroguanosine-3'-phosphate
  modified_base 10: mod_base = OTHER; note = 2'-fluoroguanosine-3'-phosphate
  modified_base 11: mod_base = OTHER; note = 2'-fluoroguanosine-3'-phosphate
  modified_base 12: mod_base = OTHER; note = 2'-O-methyladenosine-3'-phosphate
  modified_base 13: mod_base = OTHER; note = 2'-O-methylcytidine-3'-phosphate
  modified_base 14: mod_base = OTHER; note = 2'-O-methyluridine-3'-phosphate
  modified_base 15: mod_base = OTHER; note = 2'-O-methyladenosine-3'-phosphate
  modified_base 16: mod_base = OTHER; note = 2'-O-methylguanosine-3'-phosphate
  modified_base 17: mod_base = OTHER; note = 2'-O-methylguanosine-3'-phosphate
  modified_base 18: mod_base = OTHER; note = 2'-O-methylguanosine-3'-phosphate
  modified_base 19: mod_base = OTHER; note = 2'-O-methyladenosine-3'-phosphate
  modified_base 20: mod_base = OTHER; note = 2'-O-methylguanosine-3'-phosphate
  modified_base 21: mod_base = OTHER; note = 2'-O-methyluridine-3'-phosphate N-[tris(GalNAc-alkyl)-amidodecanoyl)]-4-hydroxyprolinol (Hyp-(GalNAc-alkyl)3)
agatgtcagggactagggagt

SEQ ID NO: 7026 - RNA, 21 nt, synthetic construct
  source 1..21: mol_type = other RNA
  modified_base 1: mod_base = OTHER; note = 2'-O-methylguanosine-3'-phosphorothioate
  modified_base 2: mod_base = OTHER; note = 2'-O-methyladenosine-3'-phosphorothioate
  modified_base 3: mod_base = OTHER; note = 2'-O-methyluridine-3'-phosphate
  modified_base 4: mod_base = OTHER; note = 2'-O-methylguanosine-3'-phosphate
  modified_base 5: mod_base = OTHER; note = 2'-O-methyluridine-3'-phosphate
  modified_base 6: mod_base = OTHER; note = 2'-O-methylcytidine-3'-phosphate
  modified_base 7: mod_base = OTHER; note = 2'-O-methyladenosine-3'-phosphate
  modified_base 8: mod_base = OTHER; note = 2'-O-methylguanosine-3'-phosphate
  modified_base 9: mod_base = OTHER; note = 2'-fluoroguanosine-3'-phosphate
  modified_base 10: mod_base = OTHER; note = 2'-fluoroguanosine-3'-phosphate
  modified_base 11: mod_base = OTHER; note = 2'-fluoroadenosine-3'-phosphate
  modified_base 12: mod_base = OTHER; note = 2'-O-methylcytidine-3'-phosphate
  modified_base 13: mod_base = OTHER; note = 2'-O-methyluridine-3'-phosphate
  modified_base 14: mod_base = OTHER; note = 2'-O-methyladenosine-3'-phosphate
  modified_base 15: mod_base = OTHER; note = 2'-O-methylguanosine-3'-phosphate
  modified_base 16: mod_base = OTHER; note = 2'-O-methylguanosine-3'-phosphate
  modified_base 17: mod_base = OTHER; note = 2'-O-methylguanosine-3'-phosphate
  modified_base 18: mod_base = OTHER; note = 2'-O-methyladenosine-3'-phosphate
  modified_base 19: mod_base = OTHER; note = 2'-O-methylguanosine-3'-phosphate
  modified_base 20: mod_base = OTHER; note = 2'-O-methylguanosine-3'-phosphate
  modified_base 21: mod_base = OTHER; note = 2'-O-methyluridine-3'-phosphate N-[tris(GalNAc-alkyl)-amidodecanoyl)]-4-hydroxyprolinol (Hyp-(GalNAc-alkyl)3)
gatgtcagggactagggaggt

SEQ ID NO: 7027 - RNA, 21 nt, synthetic construct
  source 1..21: mol_type = other RNA
  modified_base 1: mod_base = OTHER; note = 2'-O-methyladenosine-3'-phosphorothioate
  modified_base 2: mod_base = OTHER; note = 2'-O-methyluridine-3'-phosphorothioate
  modified_base 3: mod_base = OTHER; note = 2'-O-methylguanosine-3'-phosphate
  modified_base 4: mod_base = OTHER; note = 2'-O-methyluridine-3'-phosphate
  modified_base 5: mod_base = OTHER; note = 2'-O-methylcytidine-3'-phosphate
  modified_base 6: mod_base = OTHER; note = 2'-O-methyladenosine-3'-phosphate
  modified_base 7: mod_base = OTHER; note = 2'-O-methylguanosine-3'-phosphate
  modified_base 8: mod_base = OTHER; note = 2'-O-methylguanosine-3'-phosphate
  modified_base 9: mod_base = OTHER; note = 2'-fluoroguanosine-3'-phosphate
  modified_base 10: mod_base = OTHER; note = 2'-fluoroadenosine-3'-phosphate
  modified_base 11: mod_base = OTHER; note = 2'-fluorocytidine-3'-phosphate
  modified_base 12: mod_base = OTHER; note = 2'-O-methyluridine-3'-phosphate
  modified_base 13: mod_base = OTHER; note = 2'-O-methyladenosine-3'-phosphate
  modified_base 14: mod_base = OTHER; note = 2'-O-methylguanosine-3'-phosphate
  modified_base 15: mod_base = OTHER; note = 2'-O-methylguanosine-3'-phosphate
  modified_base 16: mod_base = OTHER; note = 2'-O-methylguanosine-3'-phosphate
  modified_base 17: mod_base = OTHER; note = 2'-O-methyladenosine-3'-phosphate
  modified_base 18: mod_base = OTHER; note = 2'-O-methylguanosine-3'-phosphate
  modified_base 19: mod_base = OTHER; note = 2'-O-methylguanosine-3'-phosphate
  modified_base 20: mod_base = OTHER; note = 2'-O-methylguanosine-3'-phosphate
  modified_base 21: mod_base = OTHER; note = 2'-O-methyluridine-3'-phosphate N-[tris(GalNAc-alkyl)-amidodecanoyl)]-4-hydroxyprolinol (Hyp-(GalNAc-alkyl)3)
atgtcagggactagggagggt

SEQ ID NO: 7028 - RNA, 21 nt, synthetic construct
  source 1..21: mol_type = other RNA
  modified_base 1: mod_base = OTHER; note = 2'-O-methylguanosine-3'-phosphorothioate
  modified_base 2: mod_base = OTHER; note = 2'-O-methyladenosine-3'-phosphorothioate
  modified_base 3: mod_base = OTHER; note = 2'-O-methylguanosine-3'-phosphate
  modified_base 4: mod_base = OTHER; note = 2'-O-methylguanosine-3'-phosphate
  modified_base 5: mod_base = OTHER; note = 2'-O-methyladenosine-3'-phosphate
  modified_base 6: mod_base = OTHER; note = 2'-O-methylguanosine-3'-phosphate
  modified_base 7: mod_base = OTHER; note = 2'-O-methylguanosine-3'-phosphate
  modified_base 8: mod_base = OTHER; note = 2'-O-methyladenosine-3'-phosphate
  modified_base 9: mod_base = OTHER; note = 2'-fluoroadenosine-3'-phosphate
  modified_base 10: mod_base = OTHER; note = 2'-fluoroguanosine-3'-phosphate
  modified_base 11: mod_base = OTHER; note = 2'-fluorocytidine-3'-phosphate
  modified_base 12: mod_base = OTHER; note = 2'-O-methyladenosine-3'-phosphate
  modified_base 13: mod_base = OTHER; note = 2'-O-methylguanosine-3'-phosphate
  modified_base 14: mod_base = OTHER; note = 2'-O-methyladenosine-3'-phosphate
  modified_base 15: mod_base = OTHER; note = 2'-O-methyluridine-3'-phosphate
  modified_base 16: mod_base = OTHER; note = 2'-O-methyladenosine-3'-phosphate
  modified_base 17: mod_base = OTHER; note = 2'-O-methylguanosine-3'-phosphate
  modified_base 18: mod_base = OTHER; note = 2'-O-methyladenosine-3'-phosphate
  modified_base 19: mod_base = OTHER; note = 2'-O-methyluridine-3'-phosphate
  modified_base 20: mod_base = OTHER; note = 2'-O-methylguanosine-3'-phosphate
  modified_base 21: mod_base = OTHER; note = 2'-O-methyluridine-3'-phosphate N-[tris(GalNAc-alkyl)-amidodecanoyl)]-4-hydroxyprolinol (Hyp-(GalNAc-alkyl)3)
gaggaggaagcagatagatgt

SEQ ID NO: 7029 - RNA, 21 nt, synthetic construct
  source 1..21: mol_type = other RNA
  modified_base 1: mod_base = OTHER; note = 2'-O-methyladenosine-3'-phosphorothioate
  modified_base 2: mod_base = OTHER; note = 2'-O-methylguanosine-3'-phosphorothioate
  modified_base 3: mod_base = OTHER; note = 2'-O-methylguanosine-3'-phosphate
  modified_base 4: mod_base = OTHER; note = 2'-O-methyladenosine-3'-phosphate
  modified_base 5: mod_base = OTHER; note = 2'-O-methylguanosine-3'-phosphate
  modified_base 6: mod_base = OTHER; note = 2'-O-methylguanosine-3'-phosphate
  modified_base 7: mod_base = OTHER; note = 2'-O-methyladenosine-3'-phosphate
  modified_base 8: mod_base = OTHER; note = 2'-O-methyladenosine-3'-phosphate
  modified_base 9: mod_base = OTHER; note = 2'-fluoroguanosine-3'-phosphate
  modified_base 10: mod_base = OTHER; note = 2'-fluorocytidine-3'-phosphate
  modified_base 11: mod_base = OTHER; note = 2'-fluoroadenosine-3'-phosphate
  modified_base 12: mod_base = OTHER; note = 2'-O-methylguanosine-3'-phosphate
  modified_base 13: mod_base = OTHER; note = 2'-O-methyladenosine-3'-phosphate
  modified_base 14: mod_base = OTHER; note = 2'-O-methyluridine-3'-phosphate
  modified_base 15: mod_base = OTHER; note = 2'-O-methyladenosine-3'-phosphate
  modified_base 16: mod_base = OTHER; note = 2'-O-methylguanosine-3'-phosphate
  modified_base 17: mod_base = OTHER; note = 2'-O-methyladenosine-3'-phosphate
  modified_base 18: mod_base = OTHER; note = 2'-O-methyluridine-3'-phosphate
  modified_base 19: mod_base = OTHER; note = 2'-O-methylguanosine-3'-phosphate
  modified_base 20: mod_base = OTHER; note = 2'-O-methylguanosine-3'-phosphate
  modified_base 21: mod_base = OTHER; note = 2'-O-methyluridine-3'-phosphate N-[tris(GalNAc-alkyl)-amidodecanoyl)]-4-hydroxyprolinol (Hyp-(GalNAc-alkyl)3)
aggaggaagcagatagatggt

SEQ ID NO: 7030 - RNA, 21 nt, synthetic construct
  source 1..21: mol_type = other RNA
  modified_base 1: mod_base = OTHER; note = 2'-O-methylguanosine-3'-phosphorothioate
  modified_base 2: mod_base = OTHER; note = 2'-O-methylguanosine-3'-phosphorothioate
  modified_base 3: mod_base = OTHER; note = 2'-O-methyladenosine-3'-phosphate
  modified_base 4: mod_base = OTHER; note = 2'-O-methylguanosine-3'-phosphate
  modified_base 5: mod_base = OTHER; note = 2'-O-methylguanosine-3'-phosphate
  modified_base 6: mod_base = OTHER; note = 2'-O-methyladenosine-3'-phosphate
  modified_base 7: mod_base = OTHER; note = 2'-O-methyladenosine-3'-phosphate
  modified_base 8: mod_base = OTHER; note = 2'-O-methylguanosine-3'-phosphate
  modified_base 9: mod_base = OTHER; note = 2'-fluorocytidine-3'-phosphate
  modified_base 10: mod_base = OTHER; note = 2'-fluoroadenosine-3'-phosphate
  modified_base 11: mod_base = OTHER; note = 2'-fluoroguanosine-3'-phosphate
  modified_base 12: mod_base = OTHER; note = 2'-O-methyladenosine-3'-phosphate
  modified_base 13: mod_base = OTHER; note = 2'-O-methyluridine-3'-phosphate
  modified_base 14: mod_base = OTHER; note = 2'-O-methyladenosine-3'-phosphate
  modified_base 15: mod_base = OTHER; note = 2'-O-methylguanosine-3'-phosphate
  modified_base 16: mod_base = OTHER; note = 2'-O-methyladenosine-3'-phosphate
  modified_base 17: mod_base = OTHER; note = 2'-O-methyluridine-3'-phosphate
  modified_base 18: mod_base = OTHER; note = 2'-O-methylguanosine-3'-phosphate
  modified_base 19: mod_base = OTHER; note = 2'-O-methylguanosine-3'-phosphate
  modified_base 20: mod_base = OTHER; note = 2'-O-methyluridine-3'-phosphate
  modified_base 21: mod_base = OTHER; note = 2'-O-methyluridine-3'-phosphate N-[tris(GalNAc-alkyl)-amidodecanoyl)]-4-hydroxyprolinol (Hyp-(GalNAc-alkyl)3)
ggaggaagcagatagatggtt

SEQ ID NO: 7031 - RNA, 21 nt, synthetic construct
  source 1..21: mol_type = other RNA
  modified_base 1: mod_base = OTHER; note = 2'-O-methylguanosine-3'-phosphorothioate
  modified_base 2: mod_base = OTHER; note = 2'-O-methyladenosine-3'-phosphorothioate
  modified_base 3: mod_base = OTHER; note = 2'-O-methylguanosine-3'-phosphate
  modified_base 4: mod_base = OTHER; note = 2'-O-methylguanosine-3'-phosphate
  modified_base 5: mod_base = OTHER; note = 2'-O-methyladenosine-3'-phosphate
  modified_base 6: mod_base = OTHER; note = 2'-O-methyladenosine-3'-phosphate
  modified_base 7: mod_base = OTHER; note = 2'-O-methylguanosine-3'-phosphate
  modified_base 8: mod_base = OTHER; note = 2'-O-methylcytidine-3'-phosphate
  modified_base 9: mod_base = OTHER; note = 2'-fluoroadenosine-3'-phosphate
  modified_base 10: mod_base = OTHER; note = 2'-fluoroguanosine-3'-phosphate
  modified_base 11: mod_base = OTHER; note = 2'-fluoroadenosine-3'-phosphate
  modified_base 12: mod_base = OTHER; note = 2'-O-methyluridine-3'-phosphate
  modified_base 13: mod_base = OTHER; note = 2'-O-methyladenosine-3'-phosphate
  modified_base 14: mod_base = OTHER; note = 2'-O-methylguanosine-3'-phosphate
  modified_base 15: mod_base = OTHER; note = 2'-O-methyladenosine-3'-phosphate
  modified_base 16: mod_base = OTHER; note = 2'-O-methyluridine-3'-phosphate
  modified_base 17: mod_base = OTHER; note = 2'-O-methylguanosine-3'-phosphate
  modified_base 18: mod_base = OTHER; note = 2'-O-methylguanosine-3'-phosphate
  modified_base 19: mod_base = OTHER; note = 2'-O-methyluridine-3'-phosphate
  modified_base 20: mod_base = OTHER; note = 2'-O-methylcytidine-3'-phosphate
  modified_base 21: mod_base = OTHER; note = 2'-O-methyluridine-3'-phosphate N-[tris(GalNAc-alkyl)-amidodecanoyl)]-4-hydroxyprolinol (Hyp-(GalNAc-alkyl)3)
gaggaagcagatagatggtct

SEQ ID NO: 7032 - RNA, 21 nt, synthetic construct
  source 1..21: mol_type = other RNA
  modified_base 1: mod_base = OTHER; note = 2'-O-methyladenosine-3'-phosphorothioate
  modified_base 2: mod_base = OTHER; note = 2'-O-methylguanosine-3'-phosphorothioate
  modified_base 3: mod_base = OTHER; note = 2'-O-methylguanosine-3'-phosphate
  modified_base 4: mod_base = OTHER; note = 2'-O-methyladenosine-3'-phosphate
  modified_base 5: mod_base = OTHER; note = 2'-O-methyladenosine-3'-phosphate
  modified_base 6: mod_base = OTHER; note = 2'-O-methylguanosine-3'-phosphate
  modified_base 7: mod_base = OTHER; note = 2'-O-methylcytidine-3'-phosphate
  modified_base 8: mod_base = OTHER; note = 2'-O-methyladenosine-3'-phosphate
  modified_base 9: mod_base = OTHER; note = 2'-fluoroguanosine-3'-phosphate
  modified_base 10: mod_base = OTHER; note = 2'-fluoroadenosine-3'-phosphate
  modified_base 11: mod_base = OTHER; note = 2'-fluorouridine-3'-phosphate
  modified_base 12: mod_base = OTHER; note = 2'-O-methyladenosine-3'-phosphate
  modified_base 13: mod_base = OTHER; note = 2'-O-methylguanosine-3'-phosphate
  modified_base 14: mod_base = OTHER; note = 2'-O-methyladenosine-3'-phosphate
  modified_base 15: mod_base = OTHER; note = 2'-O-methyluridine-3'-phosphate
  modified_base 16: mod_base = OTHER; note = 2'-O-methylguanosine-3'-phosphate
  modified_base 17: mod_base = OTHER; note = 2'-O-methylguanosine-3'-phosphate
  modified_base 18: mod_base = OTHER; note = 2'-O-methyluridine-3'-phosphate
  modified_base 19: mod_base = OTHER; note = 2'-O-methylcytidine-3'-phosphate
  modified_base 20: mod_base = OTHER; note = 2'-O-methylcytidine-3'-phosphate
  modified_base 21: mod_base = OTHER; note = 2'-O-methyluridine-3'-phosphate N-[tris(GalNAc-alkyl)-amidodecanoyl)]-4-hydroxyprolinol (Hyp-(GalNAc-alkyl)3)
aggaagcagatagatggtcct

SEQ ID NO: 7033 - RNA, 21 nt, synthetic construct
  source 1..21: mol_type = other RNA
  modified_base 1: mod_base = OTHER; note = 2'-O-methylguanosine-3'-phosphorothioate
  modified_base 2: mod_base = OTHER; note = 2'-O-methylguanosine-3'-phosphorothioate
  modified_base 3: mod_base = OTHER; note = 2'-O-methyladenosine-3'-phosphate
  modified_base 4: mod_base = OTHER; note = 2'-O-methyladenosine-3'-phosphate
  modified_base 5: mod_base = OTHER; note = 2'-O-methylguanosine-3'-phosphate
  modified_base 6: mod_base = OTHER; note = 2'-O-methylcytidine-3'-phosphate
  modified_base 7: mod_base = OTHER; note = 2'-O-methyladenosine-3'-phosphate
  modified_base 8: mod_base = OTHER; note = 2'-O-methylguanosine-3'-phosphate
  modified_base 9: mod_base = OTHER; note = 2'-fluoroadenosine-3'-phosphate
  modified_base 10: mod_base = OTHER; note = 2'-fluorouridine-3'-phosphate
  modified_base 11: mod_base = OTHER; note = 2'-fluoroadenosine-3'-phosphate
  modified_base 12: mod_base = OTHER; note = 2'-O-methylguanosine-3'-phosphate
  modified_base 13: mod_base = OTHER; note = 2'-O-methyladenosine-3'-phosphate
  modified_base 14: mod_base = OTHER; note = 2'-O-methyluridine-3'-phosphate
  modified_base 15: mod_base = OTHER; note = 2'-O-methylguanosine-3'-phosphate
  modified_base 16: mod_base = OTHER; note = 2'-O-methylguanosine-3'-phosphate
  modified_base 17: mod_base = OTHER; note = 2'-O-methyluridine-3'-phosphate
  modified_base 18: mod_base = OTHER; note = 2'-O-methylcytidine-3'-phosphate
  modified_base 19: mod_base = OTHER; note = 2'-O-methylcytidine-3'-phosphate
  modified_base 20: mod_base = OTHER; note = 2'-O-methyladenosine-3'-phosphate
  modified_base 21: mod_base = OTHER; note = 2'-O-methyluridine-3'-phosphate N-[tris(GalNAc-alkyl)-amidodecanoyl)]-4-hydroxyprolinol (Hyp-(GalNAc-alkyl)3)
ggaagcagatagatggtccat

SEQ ID NO: 7034 - RNA, 21 nt, synthetic construct
  source 1..21: mol_type = other RNA
  modified_base 1: mod_base = OTHER; note = 2'-O-methylguanosine-3'-phosphorothioate
  modified_base 2: mod_base = OTHER; note = 2'-O-methyladenosine-3'-phosphorothioate
  modified_base 3: mod_base = OTHER; note = 2'-O-methyladenosine-3'-phosphate
  modified_base 4: mod_base = OTHER; note = 2'-O-methylguanosine-3'-phosphate
  modified_base 5: mod_base = OTHER; note = 2'-O-methylcytidine-3'-phosphate
  modified_base 6: mod_base = OTHER; note = 2'-O-methyladenosine-3'-phosphate
  modified_base 7: mod_base = OTHER; note = 2'-O-methylguanosine-3'-phosphate
  modified_base 8: mod_base = OTHER; note = 2'-O-methyladenosine-3'-phosphate
  modified_base 9: mod_base = OTHER; note = 2'-fluorouridine-3'-phosphate
  modified_base 10: mod_base = OTHER; note = 2'-fluoroadenosine-3'-phosphate
  modified_base 11: mod_base = OTHER; note = 2'-fluoroguanosine-3'-phosphate
  modified_base 12: mod_base = OTHER; note = 2'-O-methyladenosine-3'-phosphate
  modified_base 13: mod_base = OTHER; note = 2'-O-methyluridine-3'-phosphate
  modified_base 14: mod_base = OTHER; note = 2'-O-methylguanosine-3'-phosphate
  modified_base 15: mod_base = OTHER; note = 2'-O-methylguanosine-3'-phosphate
  modified_base 16: mod_base = OTHER; note = 2'-O-methyluridine-3'-phosphate
  modified_base 17: mod_base = OTHER; note = 2'-O-methylcytidine-3'-phosphate
  modified_base 18: mod_base = OTHER; note = 2'-O-methylcytidine-3'-phosphate
  modified_base 19: mod_base = OTHER; note = 2'-O-methyladenosine-3'-phosphate
  modified_base 20: mod_base = OTHER; note = 2'-O-methylguanosine-3'-phosphate
  modified_base 21: mod_base = OTHER; note = 2'-O-methyluridine-3'-phosphate N-[tris(GalNAc-alkyl)-amidodecanoyl)]-4-hydroxyprolinol (Hyp-(GalNAc-alkyl)3)
gaagcagatagatggtccagt

SEQ ID NO: 7035 - RNA, 21 nt, synthetic construct
  source 1..21: mol_type = other RNA
  modified_base 1: mod_base = OTHER; note = 2'-O-methyladenosine-3'-phosphorothioate
  modified_base 2: mod_base = OTHER; note = 2'-O-methyladenosine-3'-phosphorothioate
  modified_base 3: mod_base = OTHER; note = 2'-O-methylguanosine-3'-phosphate
  modified_base 4: mod_base = OTHER; note = 2'-O-methylcytidine-3'-phosphate
  modified_base 5: mod_base = OTHER; note = 2'-O-methyladenosine-3'-phosphate
  modified_base 6: mod_base = OTHER; note = 2'-O-methylguanosine-3'-phosphate
  modified_base 7: mod_base = OTHER; note = 2'-O-methyladenosine-3'-phosphate
  modified_base 8: mod_base = OTHER; note = 2'-O-methyluridine-3'-phosphate
  modified_base 9: mod_base = OTHER; note = 2'-fluoroadenosine-3'-phosphate
  modified_base 10: mod_base = OTHER; note = 2'-fluoroguanosine-3'-phosphate
  modified_base 11: mod_base = OTHER; note = 2'-fluoroadenosine-3'-phosphate
  modified_base 12: mod_base = OTHER; note = 2'-O-methyluridine-3'-phosphate
  modified_base 13: mod_base = OTHER; note = 2'-O-methylguanosine-3'-phosphate
  modified_base 14: mod_base = OTHER; note = 2'-O-methylguanosine-3'-phosphate
  modified_base 15: mod_base = OTHER; note = 2'-O-methyluridine-3'-phosphate
  modified_base 16: mod_base = OTHER; note = 2'-O-methylcytidine-3'-phosphate
  modified_base 17: mod_base = OTHER; note = 2'-O-methylcytidine-3'-phosphate
  modified_base 18: mod_base = OTHER; note = 2'-O-methyladenosine-3'-phosphate
  modified_base 19: mod_base = OTHER; note = 2'-O-methylguanosine-3'-phosphate
  modified_base 20: mod_base = OTHER; note = 2'-O-methylcytidine-3'-phosphate
  modified_base 21: mod_base = OTHER; note = 2'-O-methyluridine-3'-phosphate N-[tris(GalNAc-alkyl)-amidodecanoyl)]-4-hydroxyprolinol (Hyp-(GalNAc-alkyl)3)
aagcagatagatggtccagct

SEQ ID NO: 7036 - RNA, 21 nt, synthetic construct
  source 1..21: mol_type = other RNA
  modified_base 1: mod_base = OTHER; note = 2'-O-methyladenosine-3'-phosphorothioate
  modified_base 2: mod_base = OTHER; note = 2'-O-methylguanosine-3'-phosphorothioate
  modified_base 3: mod_base = OTHER; note = 2'-O-methylcytidine-3'-phosphate
  modified_base 4: mod_base = OTHER; note = 2'-O-methyladenosine-3'-phosphate
  modified_base 5: mod_base = OTHER; note = 2'-O-methylguanosine-3'-phosphate
  modified_base 6: mod_base = OTHER; note = 2'-O-methyladenosine-3'-phosphate
  modified_base 7: mod_base = OTHER; note = 2'-O-methyluridine-3'-phosphate
  modified_base 8: mod_base = OTHER; note = 2'-O-methyladenosine-3'-phosphate
  modified_base 9: mod_base = OTHER; note = 2'-fluoroguanosine-3'-phosphate
  modified_base 10: mod_base = OTHER; note = 2'-fluoroadenosine-3'-phosphate
  modified_base 11: mod_base = OTHER; note = 2'-fluorouridine-3'-phosphate
  modified_base 12: mod_base = OTHER; note = 2'-O-methylguanosine-3'-phosphate
  modified_base 13: mod_base = OTHER; note = 2'-O-methylguanosine-3'-phosphate
  modified_base 14: mod_base = OTHER; note = 2'-O-methyluridine-3'-phosphate
  modified_base 15: mod_base = OTHER; note = 2'-O-methylcytidine-3'-phosphate
  modified_base 16: mod_base = OTHER; note = 2'-O-methylcytidine-3'-phosphate
  modified_base 17: mod_base = OTHER; note = 2'-O-methyladenosine-3'-phosphate
  modified_base 18: mod_base = OTHER; note = 2'-O-methylguanosine-3'-phosphate
  modified_base 19: mod_base = OTHER; note = 2'-O-methylcytidine-3'-phosphate
  modified_base 20: mod_base = OTHER; note = 2'-O-methyladenosine-3'-phosphate
  modified_base 21: mod_base = OTHER; note = 2'-O-methyluridine-3'-phosphate N-[tris(GalNAc-alkyl)-amidodecanoyl)]-4-hydroxyprolinol (Hyp-(GalNAc-alkyl)3)
agcagatagatggtccagcat

SEQ ID NO: 7037 - RNA, 21 nt, synthetic construct
  source 1..21: mol_type = other RNA
  modified_base 1: mod_base = OTHER; note = 2'-O-methylguanosine-3'-phosphorothioate
  modified_base 2: mod_base = OTHER; note = 2'-O-methylcytidine-3'-phosphorothioate
  modified_base 3: mod_base = OTHER; note = 2'-O-methyladenosine-3'-phosphate
  modified_base 4: mod_base = OTHER; note = 2'-O-methylguanosine-3'-phosphate
  modified_base 5: mod_base = OTHER; note = 2'-O-methyladenosine-3'-phosphate
  modified_base 6: mod_base = OTHER; note = 2'-O-methyluridine-3'-phosphate
  modified_base 7: mod_base = OTHER; note = 2'-O-methyladenosine-3'-phosphate
  modified_base 8: mod_base = OTHER; note = 2'-O-methylguanosine-3'-phosphate
  modified_base 9: mod_base = OTHER; note = 2'-fluoroadenosine-3'-phosphate
  modified_base 10: mod_base = OTHER; note = 2'-fluorouridine-3'-phosphate
  modified_base 11: mod_base = OTHER; note = 2'-fluoroguanosine-3'-phosphate
  modified_base 12: mod_base = OTHER; note = 2'-O-methylguanosine-3'-phosphate
  modified_base 13: mod_base = OTHER; note = 2'-O-methyluridine-3'-phosphate
  modified_base 14: mod_base = OTHER; note = 2'-O-methylcytidine-3'-phosphate
  modified_base 15: mod_base = OTHER; note = 2'-O-methylcytidine-3'-phosphate
  modified_base 16: mod_base = OTHER; note = 2'-O-methyladenosine-3'-phosphate
  modified_base 17: mod_base = OTHER; note = 2'-O-methylguanosine-3'-phosphate
  modified_base 18: mod_base = OTHER; note = 2'-O-methylcytidine-3'-phosphate
  modified_base 19: mod_base = OTHER; note = 2'-O-methyladenosine-3'-phosphate
  modified_base 20: mod_base = OTHER; note = 2'-O-methylguanosine-3'-phosphate
  modified_base 21: mod_base = OTHER; note = 2'-O-methyluridine-3'-phosphate N-[tris(GalNAc-alkyl)-amidodecanoyl)]-4-hydroxyprolinol (Hyp-(GalNAc-alkyl)3)
gcagatagatggtccagcagt

SEQ ID NO: 7038 - RNA, 21 nt, synthetic construct
  source 1..21: mol_type = other RNA
  modified_base 1: mod_base = OTHER; note = 2'-O-methylcytidine-3'-phosphorothioate
  modified_base 2: mod_base = OTHER; note = 2'-O-methyladenosine-3'-phosphorothioate
  modified_base 3: mod_base = OTHER; note = 2'-O-methylguanosine-3'-phosphate
  modified_base 4: mod_base = OTHER; note = 2'-O-methyladenosine-3'-phosphate
  modified_base 5: mod_base = OTHER; note = 2'-O-methyluridine-3'-phosphate
  modified_base 6: mod_base = OTHER; note = 2'-O-methyladenosine-3'-phosphate
  modified_base 7: mod_base = OTHER; note = 2'-O-methylguanosine-3'-phosphate
  modified_base 8: mod_base = OTHER; note = 2'-O-methyladenosine-3'-phosphate
  modified_base 9: mod_base = OTHER; note = 2'-fluorouridine-3'-phosphate
  modified_base 10: mod_base = OTHER; note = 2'-fluoroguanosine-3'-phosphate
  modified_base 11: mod_base = OTHER; note = 2'-fluoroguanosine-3'-phosphate
  modified_base 12: mod_base = OTHER; note = 2'-O-methyluridine-3'-phosphate
  modified_base 13: mod_base = OTHER; note = 2'-O-methylcytidine-3'-phosphate
  modified_base 14: mod_base = OTHER; note = 2'-O-methylcytidine-3'-phosphate
  modified_base 15: mod_base = OTHER; note = 2'-O-methyladenosine-3'-phosphate
  modified_base 16: mod_base = OTHER; note = 2'-O-methylguanosine-3'-phosphate
  modified_base 17: mod_base = OTHER; note = 2'-O-methylcytidine-3'-phosphate
  modified_base 18: mod_base = OTHER; note = 2'-O-methyladenosine-3'-phosphate
  modified_base 19: mod_base = OTHER; note = 2'-O-methylguanosine-3'-phosphate
  modified_base 20: mod_base = OTHER; note = 2'-O-methylguanosine-3'-phosphate
  modified_base 21: mod_base = OTHER; note = 2'-O-methyluridine-3'-phosphate N-[tris(GalNAc-alkyl)-amidodecanoyl)]-4-hydroxyprolinol (Hyp-(GalNAc-alkyl)3)
cagatagatggtccagcaggt

SEQ ID NO: 7039 - RNA, 21 nt, synthetic construct
  source 1..21: mol_type = other RNA
  modified_base 1: mod_base = OTHER; note = 2'-O-methyladenosine-3'-phosphorothioate
  modified_base 2: mod_base = OTHER; note = 2'-O-methylguanosine-3'-phosphorothioate
  modified_base 3: mod_base = OTHER; note = 2'-O-methyladenosine-3'-phosphate
  modified_base 4: mod_base = OTHER; note = 2'-O-methyluridine-3'-phosphate
  modified_base 5: mod_base = OTHER; note = 2'-O-methyladenosine-3'-phosphate
  modified_base 6: mod_base = OTHER; note = 2'-O-methylguanosine-3'-phosphate
  modified_base 7: mod_base = OTHER; note = 2'-O-methyladenosine-3'-phosphate
  modified_base 8: mod_base = OTHER; note = 2'-O-methyluridine-3'-phosphate
  modified_base 9: mod_base = OTHER; note = 2'-fluoroguanosine-3'-phosphate
  modified_base 10: mod_base = OTHER; note = 2'-fluoroguanosine-3'-phosphate
  modified_base 11: mod_base = OTHER; note = 2'-fluorouridine-3'-phosphate
  modified_base 12: mod_base = OTHER; note = 2'-O-methylcytidine-3'-phosphate
  modified_base 13: mod_base = OTHER; note = 2'-O-methylcytidine-3'-phosphate
  modified_base 14: mod_base = OTHER; note = 2'-O-methyladenosine-3'-phosphate
  modified_base 15: mod_base = OTHER; note = 2'-O-methylguanosine-3'-phosphate
  modified_base 16: mod_base = OTHER; note = 2'-O-methylcytidine-3'-phosphate
  modified_base 17: mod_base = OTHER; note = 2'-O-methyladenosine-3'-phosphate
  modified_base 18: mod_base = OTHER; note = 2'-O-methylguanosine-3'-phosphate
  modified_base 19: mod_base = OTHER; note = 2'-O-methylguanosine-3'-phosphate
  modified_base 20: mod_base = OTHER; note = 2'-O-methylcytidine-3'-phosphate
  modified_base 21: mod_base = OTHER; note = 2'-O-methyluridine-3'-phosphate N-[tris(GalNAc-alkyl)-amidodecanoyl)]-4-hydroxyprolinol (Hyp-(GalNAc-alkyl)3)
agatagatggtccagcaggct

SEQ ID NO: 7040 - RNA, 21 nt, synthetic construct
  source 1..21: mol_type = other RNA
  modified_base 1: mod_base = OTHER; note = 2'-O-methylguanosine-3'-phosphorothioate
  modified_base 2: mod_base = OTHER; note = 2'-O-methyladenosine-3'-phosphorothioate
  modified_base 3: mod_base = OTHER; note = 2'-O-methyluridine-3'-phosphate
  modified_base 4: mod_base = OTHER; note = 2'-O-methyladenosine-3'-phosphate
  modified_base 5: mod_base = OTHER; note = 2'-O-methylguanosine-3'-phosphate
  modified_base 6: mod_base = OTHER; note = 2'-O-methyladenosine-3'-phosphate
  modified_base 7: mod_base = OTHER; note = 2'-O-methyluridine-3'-phosphate
  modified_base 8: mod_base = OTHER; note = 2'-O-methylguanosine-3'-phosphate
  modified_base 9: mod_base = OTHER; note = 2'-fluoroguanosine-3'-phosphate
  modified_base 10: mod_base = OTHER; note = 2'-fluorouridine-3'-phosphate
  modified_base 11: mod_base = OTHER; note = 2'-fluorocytidine-3'-phosphate
  modified_base 12: mod_base = OTHER; note = 2'-O-methylcytidine-3'-phosphate
  modified_base 13: mod_base = OTHER; note = 2'-O-methyladenosine-3'-phosphate
  modified_base 14: mod_base = OTHER; note = 2'-O-methylguanosine-3'-phosphate
  modified_base 15: mod_base = OTHER; note = 2'-O-methylcytidine-3'-phosphate
  modified_base 16: mod_base = OTHER; note = 2'-O-methyladenosine-3'-phosphate
  modified_base 17: mod_base = OTHER; note = 2'-O-methylguanosine-3'-phosphate
  modified_base 18: mod_base = OTHER; note = 2'-O-methylguanosine-3'-phosphate
  modified_base 19: mod_base = OTHER; note = 2'-O-methylcytidine-3'-phosphate
  modified_base 20: mod_base = OTHER; note = 2'-O-methyluridine-3'-phosphate
  modified_base 21: mod_base = OTHER; note = 2'-O-methyluridine-3'-phosphate N-[tris(GalNAc-alkyl)-amidodecanoyl)]-4-hydroxyprolinol (Hyp-(GalNAc-alkyl)3)
gatagatggtccagcaggctt

SEQ ID NO: 7041 - RNA, 21 nt, synthetic construct
  source 1..21: mol_type = other RNA
  modified_base 1: mod_base = OTHER; note = 2'-O-methyladenosine-3'-phosphorothioate
  modified_base 2: mod_base = OTHER; note = 2'-O-methyluridine-3'-phosphorothioate
  modified_base 3: mod_base = OTHER; note = 2'-O-methyladenosine-3'-phosphate
  modified_base 4: mod_base = OTHER; note = 2'-O-methylguanosine-3'-phosphate
  modified_base 5: mod_base = OTHER; note = 2'-O-methyladenosine-3'-phosphate
  modified_base 6: mod_base = OTHER; note = 2'-O-methyluridine-3'-phosphate
  modified_base 7: mod_base = OTHER; note = 2'-O-methylguanosine-3'-phosphate
  modified_base 8: mod_base = OTHER; note = 2'-O-methylguanosine-3'-phosphate
  modified_base 9: mod_base = OTHER; note = 2'-fluorouridine-3'-phosphate
  modified_base 10: mod_base = OTHER; note = 2'-fluorocytidine-3'-phosphate
  modified_base 11: mod_base = OTHER; note = 2'-fluorocytidine-3'-phosphate
  modified_base 12: mod_base = OTHER; note = 2'-O-methyladenosine-3'-phosphate
  modified_base 13: mod_base = OTHER; note = 2'-O-methylguanosine-3'-phosphate
  modified_base 14: mod_base = OTHER; note = 2'-O-methylcytidine-3'-phosphate
  modified_base 15: mod_base = OTHER; note = 2'-O-methyladenosine-3'-phosphate
  modified_base 16: mod_base = OTHER; note = 2'-O-methylguanosine-3'-phosphate
  modified_base 17: mod_base = OTHER; note = 2'-O-methylguanosine-3'-phosphate
  modified_base 18: mod_base = OTHER; note = 2'-O-methylcytidine-3'-phosphate
  modified_base 19: mod_base = OTHER; note = 2'-O-methyluridine-3'-phosphate
  modified_base 20: mod_base = OTHER; note = 2'-O-methyluridine-3'-phosphate
  modified_base 21: mod_base = OTHER; note = 2'-O-methyluridine-3'-phosphate N-[tris(GalNAc-alkyl)-amidodecanoyl)]-4-hydroxyprolinol (Hyp-(GalNAc-alkyl)3)
atagatggtccagcaggcttt

SEQ ID NO: 7042 - RNA, 21 nt, synthetic construct
  source 1..21: mol_type = other RNA
  modified_base 1: mod_base = OTHER; note = 2'-O-methyluridine-3'-phosphorothioate
  modified_base 2: mod_base = OTHER; note = 2'-O-methyladenosine-3'-phosphorothioate
  modified_base 3: mod_base = OTHER; note = 2'-O-methylguanosine-3'-phosphate
  modified_base 4: mod_base = OTHER; note = 2'-O-methyladenosine-3'-phosphate
  modified_base 5: mod_base = OTHER; note = 2'-O-methyluridine-3'-phosphate
  modified_base 6: mod_base = OTHER; note = 2'-O-methylguanosine-3'-phosphate
  modified_base 7: mod_base = OTHER; note = 2'-O-methylguanosine-3'-phosphate
  modified_base 8: mod_base = OTHER; note = 2'-O-methyluridine-3'-phosphate
  modified_base 9: mod_base = OTHER; note = 2'-fluorocytidine-3'-phosphate
  modified_base 10: mod_base = OTHER; note = 2'-fluorocytidine-3'-phosphate
  modified_base 11: mod_base = OTHER; note = 2'-fluoroadenosine-3'-phosphate
  modified_base 12: mod_base = OTHER; note = 2'-O-methylguanosine-3'-phosphate
  modified_base 13: mod_base = OTHER; note = 2'-O-methylcytidine-3'-phosphate
  modified_base 14: mod_base = OTHER; note = 2'-O-methyladenosine-3'-phosphate
  modified_base 15: mod_base = OTHER; note = 2'-O-methylguanosine-3'-phosphate
  modified_base 16: mod_base = OTHER; note = 2'-O-methylguanosine-3'-phosphate
  modified_base 17: mod_base = OTHER; note = 2'-O-methylcytidine-3'-phosphate
  modified_base 18: mod_base = OTHER; note = 2'-O-methyluridine-3'-phosphate
  modified_base 19: mod_base = OTHER; note = 2'-O-methyluridine-3'-phosphate
  modified_base 20: mod_base = OTHER; note = 2'-O-methylguanosine-3'-phosphate
  modified_base 21: mod_base = OTHER; note = 2'-O-methyluridine-3'-phosphate N-[tris(GalNAc-alkyl)-amidodecanoyl)]-4-hydroxyprolinol (Hyp-(GalNAc-alkyl)3)
tagatggtccagcaggcttgt

SEQ ID NO: 7043 - RNA, 21 nt, synthetic construct
  source 1..21: mol_type = other RNA
  modified_base 1: mod_base = OTHER; note = 2'-O-methyladenosine-3'-phosphorothioate
  modified_base 2: mod_base = OTHER; note = 2'-O-methylguanosine-3'-phosphorothioate
  modified_base 3: mod_base = OTHER; note = 2'-O-methyladenosine-3'-phosphate
  modified_base 4: mod_base = OTHER; note = 2'-O-methyluridine-3'-phosphate
  modified_base 5: mod_base = OTHER; note = 2'-O-methylguanosine-3'-phosphate
  modified_base 6: mod_base = OTHER; note = 2'-O-methylguanosine-3'-phosphate
  modified_base 7: mod_base = OTHER; note = 2'-O-methyluridine-3'-phosphate
  modified_base 8: mod_base = OTHER; note = 2'-O-methylcytidine-3'-phosphate
  modified_base 9: mod_base = OTHER; note = 2'-fluorocytidine-3'-phosphate
  modified_base 10: mod_base = OTHER; note = 2'-fluoroadenosine-3'-phosphate
  modified_base 11: mod_base = OTHER; note = 2'-fluoroguanosine-3'-phosphate
  modified_base 12: mod_base = OTHER; note = 2'-O-methylcytidine-3'-phosphate
  modified_base 13: mod_base = OTHER; note = 2'-O-methyladenosine-3'-phosphate
  modified_base 14: mod_base = OTHER; note = 2'-O-methylguanosine-3'-phosphate
  modified_base 15: mod_base = OTHER; note = 2'-O-methylguanosine-3'-phosphate
  modified_base 16: mod_base = OTHER; note = 2'-O-methylcytidine-3'-phosphate
  modified_base 17: mod_base = OTHER; note = 2'-O-methyluridine-3'-phosphate
  modified_base 18: mod_base = OTHER; note = 2'-O-methyluridine-3'-phosphate
  modified_base 19: mod_base = OTHER; note = 2'-O-methylguanosine-3'-phosphate
  modified_base 20: mod_base = OTHER; note = 2'-O-methyladenosine-3'-phosphate
  modified_base 21: mod_base = OTHER; note = 2'-O-methyluridine-3'-phosphate N-[tris(GalNAc-alkyl)-amidodecanoyl)]-4-hydroxyprolinol (Hyp-(GalNAc-alkyl)3)
agatggtccagcaggcttgat

SEQ ID NO: 7044 - RNA, 21 nt, synthetic construct
  source 1..21: mol_type = other RNA
  modified_base 1: mod_base = OTHER; note = 2'-O-methylguanosine-3'-phosphorothioate
  modified_base 2: mod_base = OTHER; note = 2'-O-methyladenosine-3'-phosphorothioate
  modified_base 3: mod_base = OTHER; note = 2'-O-methyluridine-3'-phosphate
  modified_base 4: mod_base = OTHER; note = 2'-O-methylguanosine-3'-phosphate
  modified_base 5: mod_base = OTHER; note = 2'-O-methylguanosine-3'-phosphate
  modified_base 6: mod_base = OTHER; note = 2'-O-methyluridine-3'-phosphate
  modified_base 7: mod_base = OTHER; note = 2'-O-methylcytidine-3'-phosphate
  modified_base 8: mod_base = OTHER; note = 2'-O-methylcytidine-3'-phosphate
  modified_base 9: mod_base = OTHER; note = 2'-fluoroadenosine-3'-phosphate
  modified_base 10: mod_base = OTHER; note = 2'-fluoroguanosine-3'-phosphate
  modified_base 11: mod_base = OTHER; note = 2'-fluorocytidine-3'-phosphate
  modified_base 12: mod_base = OTHER; note = 2'-O-methyladenosine-3'-phosphate
  modified_base 13: mod_base = OTHER; note = 2'-O-methylguanosine-3'-phosphate
  modified_base 14: mod_base = OTHER; note = 2'-O-methylguanosine-3'-phosphate
  modified_base 15: mod_base = OTHER; note = 2'-O-methylcytidine-3'-phosphate
  modified_base 16: mod_base = OTHER; note = 2'-O-methyluridine-3'-phosphate
  modified_base 17: mod_base = OTHER; note = 2'-O-methyluridine-3'-phosphate
  modified_base 18: mod_base = OTHER; note = 2'-O-methylguanosine-3'-phosphate
  modified_base 19: mod_base = OTHER; note = 2'-O-methyladenosine-3'-phosphate
  modified_base 20: mod_base = OTHER; note = 2'-O-methyladenosine-3'-phosphate
  modified_base 21: mod_base = OTHER; note = 2'-O-methyluridine-3'-phosphate N-[tris(GalNAc-alkyl)-amidodecanoyl)]-4-hydroxyprolinol (Hyp-(GalNAc-alkyl)3)
gatggtccagcaggcttgaat

SEQ ID NO: 7045 - RNA, 21 nt, synthetic construct
  source 1..21: mol_type = other RNA
  modified_base 1: mod_base = OTHER; note = 2'-O-methyladenosine-3'-phosphorothioate
  modified_base 2: mod_base = OTHER; note = 2'-O-methyluridine-3'-phosphorothioate
  modified_base 3: mod_base = OTHER; note = 2'-O-methylguanosine-3'-phosphate
  modified_base 4: mod_base = OTHER; note = 2'-O-methylguanosine-3'-phosphate
  modified_base 5: mod_base = OTHER; note = 2'-O-methyluridine-3'-phosphate
  modified_base 6: mod_base = OTHER; note = 2'-O-methylcytidine-3'-phosphate
  modified_base 7: mod_base = OTHER; note = 2'-O-methylcytidine-3'-phosphate
  modified_base 8: mod_base = OTHER; note = 2'-O-methyladenosine-3'-phosphate
  modified_base 9: mod_base = OTHER; note = 2'-fluoroguanosine-3'-phosphate
  modified_base 10: mod_base = OTHER; note = 2'-fluorocytidine-3'-phosphate
  modified_base 11: mod_base = OTHER; note = 2'-fluoroadenosine-3'-phosphate
  modified_base 12: mod_base = OTHER; note = 2'-O-methylguanosine-3'-phosphate
  modified_base 13: mod_base = OTHER; note = 2'-O-methylguanosine-3'-phosphate
  modified_base 14: mod_base = OTHER; note = 2'-O-methylcytidine-3'-phosphate
  modified_base 15: mod_base = OTHER; note = 2'-O-methyluridine-3'-phosphate
  modified_base 16: mod_base = OTHER; note = 2'-O-methyluridine-3'-phosphate
  modified_base 17: mod_base = OTHER; note = 2'-O-methylguanosine-3'-phosphate
  modified_base 18: mod_base = OTHER; note = 2'-O-methyladenosine-3'-phosphate
  modified_base 19: mod_base = OTHER; note = 2'-O-methyladenosine-3'-phosphate
  modified_base 20: mod_base = OTHER; note = 2'-O-methylguanosine-3'-phosphate
  modified_base 21: mod_base = OTHER; note = 2'-O-methyluridine-3'-phosphate N-[tris(GalNAc-alkyl)-amidodecanoyl)]-4-hydroxyprolinol (Hyp-(GalNAc-alkyl)3)
atggtccagcaggcttgaagt

SEQ ID NO: 7046 - RNA, 21 nt, synthetic construct
  source 1..21: mol_type = other RNA
  modified_base 1: mod_base = OTHER; note = 2'-O-methyluridine-3'-phosphorothioate
  modified_base 2: mod_base = OTHER; note = 2'-O-methylguanosine-3'-phosphorothioate
  modified_base 3: mod_base = OTHER; note = 2'-O-methylguanosine-3'-phosphate
  modified_base 4: mod_base = OTHER; note = 2'-O-methyluridine-3'-phosphate
  modified_base 5: mod_base = OTHER; note = 2'-O-methylcytidine-3'-phosphate
  modified_base 6: mod_base = OTHER; note = 2'-O-methylcytidine-3'-phosphate
  modified_base 7: mod_base = OTHER; note = 2'-O-methyladenosine-3'-phosphate
  modified_base 8: mod_base = OTHER; note = 2'-O-methylguanosine-3'-phosphate
  modified_base 9: mod_base = OTHER; note = 2'-fluorocytidine-3'-phosphate
  modified_base 10: mod_base = OTHER; note = 2'-fluoroadenosine-3'-phosphate
  modified_base 11: mod_base = OTHER; note = 2'-fluoroguanosine-3'-phosphate
  modified_base 12: mod_base = OTHER; note = 2'-O-methylguanosine-3'-phosphate
  modified_base 13: mod_base = OTHER; note = 2'-O-methylcytidine-3'-phosphate
  modified_base 14: mod_base = OTHER; note = 2'-O-methyluridine-3'-phosphate
  modified_base 15: mod_base = OTHER; note = 2'-O-methyluridine-3'-phosphate
  modified_base 16: mod_base = OTHER; note = 2'-O-methylguanosine-3'-phosphate
  modified_base 17: mod_base = OTHER; note = 2'-O-methyladenosine-3'-phosphate
  modified_base 18: mod_base = OTHER; note = 2'-O-methyladenosine-3'-phosphate
  modified_base 19: mod_base = OTHER; note = 2'-O-methylguanosine-3'-phosphate
  modified_base 20: mod_base = OTHER; note = 2'-O-methylcytidine-3'-phosphate
  modified_base 21: mod_base = OTHER; note = 2'-O-methyluridine-3'-phosphate N-[tris(GalNAc-alkyl)-amidodecanoyl)]-4-hydroxyprolinol (Hyp-(GalNAc-alkyl)3)
tggtccagcaggcttgaagct

SEQ ID NO: 7047 - RNA, 21 nt, synthetic construct
  source 1..21: mol_type = other RNA
  modified_base 1: mod_base = OTHER; note = 2'-O-methylguanosine-3'-phosphorothioate
  modified_base 2: mod_base = OTHER; note = 2'-O-methylguanosine-3'-phosphorothioate
  modified_base 3: mod_base = OTHER; note = 2'-O-methyluridine-3'-phosphate
  modified_base 4: mod_base = OTHER; note = 2'-O-methylcytidine-3'-phosphate
  modified_base 5: mod_base = OTHER; note = 2'-O-methylcytidine-3'-phosphate
  modified_base 6: mod_base = OTHER; note = 2'-O-methyladenosine-3'-phosphate
  modified_base 7: mod_base = OTHER; note = 2'-O-methylguanosine-3'-phosphate
  modified_base 8: mod_base = OTHER; note = 2'-O-methylcytidine-3'-phosphate
  modified_base 9: mod_base = OTHER; note = 2'-fluoroadenosine-3'-phosphate
  modified_base 10: mod_base = OTHER; note = 2'-fluoroguanosine-3'-phosphate
  modified_base 11: mod_base = OTHER; note = 2'-fluoroguanosine-3'-phosphate
  modified_base 12: mod_base = OTHER; note = 2'-O-methylcytidine-3'-phosphate
  modified_base 13: mod_base = OTHER; note = 2'-O-methyluridine-3'-phosphate
  modified_base 14: mod_base = OTHER; note = 2'-O-methyluridine-3'-phosphate
  modified_base 15: mod_base = OTHER; note = 2'-O-methylguanosine-3'-phosphate
  modified_base 16: mod_base = OTHER; note = 2'-O-methyladenosine-3'-phosphate
  modified_base 17: mod_base = OTHER; note = 2'-O-methyladenosine-3'-phosphate
  modified_base 18: mod_base = OTHER; note = 2'-O-methylguanosine-3'-phosphate
  modified_base 19: mod_base = OTHER; note = 2'-O-methylcytidine-3'-phosphate
  modified_base 20: mod_base = OTHER; note = 2'-O-methyladenosine-3'-phosphate
  modified_base 21: mod_base = OTHER; note = 2'-O-methyluridine-3'-phosphate N-[tris(GalNAc-alkyl)-amidodecanoyl)]-4-hydroxyprolinol (Hyp-(GalNAc-alkyl)3)
ggtccagcaggcttgaagcat

SEQ ID NO: 7048 - RNA, 21 nt, synthetic construct
  source 1..21: mol_type = other RNA
  modified_base 1: mod_base = OTHER; note = 2'-O-methylguanosine-3'-phosphorothioate
  modified_base 2: mod_base = OTHER; note = 2'-O-methyluridine-3'-phosphorothioate
  modified_base 3: mod_base = OTHER; note = 2'-O-methylcytidine-3'-phosphate
  modified_base 4: mod_base = OTHER; note = 2'-O-methylcytidine-3'-phosphate
  modified_base 5: mod_base = OTHER; note = 2'-O-methyladenosine-3'-phosphate
  modified_base 6: mod_base = OTHER; note = 2'-O-methylguanosine-3'-phosphate
  modified_base 7: mod_base = OTHER; note = 2'-O-methylcytidine-3'-phosphate
  modified_base 8: mod_base = OTHER; note = 2'-O-methyladenosine-3'-phosphate
  modified_base 9: mod_base = OTHER; note = 2'-fluoroguanosine-3'-phosphate
  modified_base 10: mod_base = OTHER; note = 2'-fluoroguanosine-3'-phosphate
  modified_base 11: mod_base = OTHER; note = 2'-fluorocytidine-3'-phosphate
  modified_base 12: mod_base = OTHER; note = 2'-O-methyluridine-3'-phosphate
  modified_base 13: mod_base = OTHER; note = 2'-O-methyluridine-3'-phosphate
  modified_base 14: mod_base = OTHER; note = 2'-O-methylguanosine-3'-phosphate
  modified_base 15: mod_base = OTHER; note = 2'-O-methyladenosine-3'-phosphate
  modified_base 16: mod_base = OTHER; note = 2'-O-methyladenosine-3'-phosphate
  modified_base 17: mod_base = OTHER; note = 2'-O-methylguanosine-3'-phosphate
  modified_base 18: mod_base = OTHER; note = 2'-O-methylcytidine-3'-phosphate
  modified_base 19: mod_base = OTHER; note = 2'-O-methyladenosine-3'-phosphate
  modified_base 20: mod_base = OTHER; note = 2'-O-methylguanosine-3'-phosphate
  modified_base 21: mod_base = OTHER; note = 2'-O-methyluridine-3'-phosphate N-[tris(GalNAc-alkyl)-amidodecanoyl)]-4-hydroxyprolinol (Hyp-(GalNAc-alkyl)3)
gtccagcaggcttgaagcagt

SEQ ID NO: 7049 - RNA, 21 nt, synthetic construct
  source 1..21: mol_type = other RNA
  modified_base 1: mod_base = OTHER; note = 2'-O-methyladenosine-3'-phosphorothioate
  modified_base 2: mod_base = OTHER; note = 2'-O-methyladenosine-3'-phosphorothioate
  modified_base 3: mod_base = OTHER; note = 2'-O-methylguanosine-3'-phosphate
  modified_base 4: mod_base = OTHER; note = 2'-O-methylguanosine-3'-phosphate
  modified_base 5: mod_base = OTHER; note = 2'-O-methyluridine-3'-phosphate
  modified_base 6: mod_base = OTHER; note = 2'-O-methylcytidine-3'-phosphate
  modified_base 7: mod_base = OTHER; note = 2'-O-methyladenosine-3'-phosphate
  modified_base 8: mod_base = OTHER; note = 2'-O-methyladenosine-3'-phosphate
  modified_base 9: mod_base = OTHER; note = 2'-fluoroguanosine-3'-phosphate
  modified_base 10: mod_base = OTHER; note = 2'-fluoroadenosine-3'-phosphate
  modified_base 11: mod_base = OTHER; note = 2'-fluoroguanosine-3'-phosphate
  modified_base 12: mod_base = OTHER; note = 2'-O-methylguanosine-3'-phosphate
  modified_base 13: mod_base = OTHER; note = 2'-O-methylguanosine-3'-phosphate
  modified_base 14: mod_base = OTHER; note = 2'-O-methyladenosine-3'-phosphate
  modified_base 15: mod_base = OTHER; note = 2'-O-methylguanosine-3'-phosphate
  modified_base 16: mod_base = OTHER; note = 2'-O-methyladenosine-3'-phosphate
  modified_base 17: mod_base = OTHER; note = 2'-O-methyluridine-3'-phosphate
  modified_base 18: mod_base = OTHER; note = 2'-O-methylguanosine-3'-phosphate
  modified_base 19: mod_base = OTHER; note = 2'-O-methylguanosine-3'-phosphate
  modified_base 20: mod_base = OTHER; note = 2'-O-methylguanosine-3'-phosphate
  modified_base 21: mod_base = OTHER; note = 2'-O-methyluridine-3'-phosphate N-[tris(GalNAc-alkyl)-amidodecanoyl)]-4-hydroxyprolinol (Hyp-(GalNAc-alkyl)3)
aaggtcaagagggagatgggt

SEQ ID NO: 7050 - RNA, 21 nt, synthetic construct
  source 1..21: mol_type = other RNA
  modified_base 1: mod_base = OTHER; note = 2'-O-methyladenosine-3'-phosphorothioate
  modified_base 2: mod_base = OTHER; note = 2'-O-methylguanosine-3'-phosphorothioate
  modified_base 3: mod_base = OTHER; note = 2'-O-methylguanosine-3'-phosphate
  modified_base 4: mod_base = OTHER; note = 2'-O-methyluridine-3'-phosphate
  modified_base 5: mod_base = OTHER; note = 2'-O-methylcytidine-3'-phosphate
  modified_base 6: mod_base = OTHER; note = 2'-O-methyladenosine-3'-phosphate
  modified_base 7: mod_base = OTHER; note = 2'-O-methyladenosine-3'-phosphate
  modified_base 8: mod_base = OTHER; note = 2'-O-methylguanosine-3'-phosphate
  modified_base 9: mod_base = OTHER; note = 2'-fluoroadenosine-3'-phosphate
  modified_base 10: mod_base = OTHER; note = 2'-fluoroguanosine-3'-phosphate
  modified_base 11: mod_base = OTHER; note = 2'-fluoroguanosine-3'-phosphate
  modified_base 12: mod_base = OTHER; note = 2'-O-methylguanosine-3'-phosphate
  modified_base 13: mod_base = OTHER; note = 2'-O-methyladenosine-3'-phosphate
  modified_base 14: mod_base = OTHER; note = 2'-O-methylguanosine-3'-phosphate
  modified_base 15: mod_base = OTHER; note = 2'-O-methyladenosine-3'-phosphate
  modified_base 16: mod_base = OTHER; note = 2'-O-methyluridine-3'-phosphate
  modified_base 17: mod_base = OTHER; note = 2'-O-methylguanosine-3'-phosphate
  modified_base 18: mod_base = OTHER; note = 2'-O-methylguanosine-3'-phosphate
  modified_base 19: mod_base = OTHER; note = 2'-O-methylguanosine-3'-phosphate
  modified_base 20: mod_base = OTHER; note = 2'-O-methylcytidine-3'-phosphate
  modified_base 21: mod_base = OTHER; note = 2'-O-methyluridine-3'-phosphate N-[tris(GalNAc-alkyl)-amidodecanoyl)]-4-hydroxyprolinol (Hyp-(GalNAc-alkyl)3)
aggtcaagagggagatgggct

SEQ ID NO: 7051 - RNA, 21 nt, synthetic construct
  source 1..21: mol_type = other RNA
  modified_base 1: mod_base = OTHER; note = 2'-O-methylguanosine-3'-phosphorothioate
  modified_base 2: mod_base = OTHER; note = 2'-O-methylguanosine-3'-phosphorothioate
  modified_base 3: mod_base = OTHER; note = 2'-O-methyluridine-3'-phosphate
  modified_base 4: mod_base = OTHER; note = 2'-O-methylcytidine-3'-phosphate
  modified_base 5: mod_base = OTHER; note = 2'-O-methyladenosine-3'-phosphate
  modified_base 6: mod_base = OTHER; note = 2'-O-methyladenosine-3'-phosphate
  modified_base 7: mod_base = OTHER; note = 2'-O-methylguanosine-3'-phosphate
  modified_base 8: mod_base = OTHER; note = 2'-O-methyladenosine-3'-phosphate
  modified_base 9: mod_base = OTHER; note = 2'-fluoroguanosine-3'-phosphate
  modified_base 10: mod_base = OTHER; note = 2'-fluoroguanosine-3'-phosphate
  modified_base 11: mod_base = OTHER; note = 2'-fluoroguanosine-3'-phosphate
  modified_base 12: mod_base = OTHER; note = 2'-O-methyladenosine-3'-phosphate
  modified_base 13: mod_base = OTHER; note = 2'-O-methylguanosine-3'-phosphate
  modified_base 14: mod_base = OTHER; note = 2'-O-methyladenosine-3'-phosphate
  modified_base 15: mod_base = OTHER; note = 2'-O-methyluridine-3'-phosphate
  modified_base 16: mod_base = OTHER; note = 2'-O-methylguanosine-3'-phosphate
  modified_base 17: mod_base = OTHER; note = 2'-O-methylguanosine-3'-phosphate
  modified_base 18: mod_base = OTHER; note = 2'-O-methylguanosine-3'-phosphate
  modified_base 19: mod_base = OTHER; note = 2'-O-methylcytidine-3'-phosphate
  modified_base 20: mod_base = OTHER; note = 2'-O-methyladenosine-3'-phosphate
  modified_base 21: mod_base = OTHER; note = 2'-O-methyluridine-3'-phosphate N-[tris(GalNAc-alkyl)-amidodecanoyl)]-4-hydroxyprolinol (Hyp-(GalNAc-alkyl)3)
ggtcaagagggagatgggcat

SEQ ID NO: 7052 - RNA, 21 nt, synthetic construct
  source 1..21: mol_type = other RNA
  modified_base 1: mod_base = OTHER; note = 2'-O-methylguanosine-3'-phosphorothioate
  modified_base 2: mod_base = OTHER; note = 2'-O-methyluridine-3'-phosphorothioate
  modified_base 3: mod_base = OTHER; note = 2'-O-methylcytidine-3'-phosphate
  modified_base 4: mod_base = OTHER; note = 2'-O-methyladenosine-3'-phosphate
  modified_base 5: mod_base = OTHER; note = 2'-O-methyladenosine-3'-phosphate
  modified_base 6: mod_base = OTHER; note = 2'-O-methylguanosine-3'-phosphate
  modified_base 7: mod_base = OTHER; note = 2'-O-methyladenosine-3'-phosphate
  modified_base 8: mod_base = OTHER; note = 2'-O-methylguanosine-3'-phosphate
  modified_base 9: mod_base = OTHER; note = 2'-fluoroguanosine-3'-phosphate
  modified_base 10: mod_base = OTHER; note = 2'-fluoroguanosine-3'-phosphate
  modified_base 11: mod_base = OTHER; note = 2'-fluoroadenosine-3'-phosphate
  modified_base 12: mod_base = OTHER; note = 2'-O-methylguanosine-3'-phosphate
  modified_base 13: mod_base = OTHER; note = 2'-O-methyladenosine-3'-phosphate
  modified_base 14: mod_base = OTHER; note = 2'-O-methyluridine-3'-phosphate
  modified_base 15: mod_base = OTHER; note = 2'-O-methylguanosine-3'-phosphate
  modified_base 16: mod_base = OTHER; note = 2'-O-methylguanosine-3'-phosphate
  modified_base 17: mod_base = OTHER; note = 2'-O-methylguanosine-3'-phosphate
  modified_base 18: mod_base = OTHER; note = 2'-O-methylcytidine-3'-phosphate
  modified_base 19: mod_base = OTHER; note = 2'-O-methyladenosine-3'-phosphate
  modified_base 20: mod_base = OTHER; note = 2'-O-methyladenosine-3'-phosphate
  modified_base 21: mod_base = OTHER; note = 2'-O-methyluridine-3'-phosphate N-[tris(GalNAc-alkyl)-amidodecanoyl)]-4-hydroxyprolinol (Hyp-(GalNAc-alkyl)3)
gtcaagagggagatgggcaat

SEQ ID NO: 7053 - RNA, 21 nt, synthetic construct
  source 1..21: mol_type = other RNA
  modified_base 1: mod_base = OTHER; note = 2'-O-methyluridine-3'-phosphorothioate
  modified_base 2: mod_base = OTHER; note = 2'-O-methylcytidine-3'-phosphorothioate
  modified_base 3: mod_base = OTHER; note = 2'-O-methyladenosine-3'-phosphate
  modified_base 4: mod_base = OTHER; note = 2'-O-methyladenosine-3'-phosphate
  modified_base 5: mod_base = OTHER; note = 2'-O-methylguanosine-3'-phosphate
  modified_base 6: mod_base = OTHER; note = 2'-O-methyladenosine-3'-phosphate
  modified_base 7: mod_base = OTHER; note = 2'-O-methylguanosine-3'-phosphate
  modified_base 8: mod_base = OTHER; note = 2'-O-methylguanosine-3'-phosphate
  modified_base 9: mod_base = OTHER; note = 2'-fluoroguanosine-3'-phosphate
  modified_base 10: mod_base = OTHER; note = 2'-fluoroadenosine-3'-phosphate
  modified_base 11: mod_base = OTHER; note = 2'-fluoroguanosine-3'-phosphate
  modified_base 12: mod_base = OTHER; note = 2'-O-methyladenosine-3'-phosphate
  modified_base 13: mod_base = OTHER; note = 2'-O-methyluridine-3'-phosphate
  modified_base 14: mod_base = OTHER; note = 2'-O-methylguanosine-3'-phosphate
  modified_base 15: mod_base = OTHER; note = 2'-O-methylguanosine-3'-phosphate
  modified_base 16: mod_base = OTHER; note = 2'-O-methylguanosine-3'-phosphate
  modified_base 17: mod_base = OTHER; note = 2'-O-methylcytidine-3'-phosphate
  modified_base 18: mod_base = OTHER; note = 2'-O-methyladenosine-3'-phosphate
  modified_base 19: mod_base = OTHER; note = 2'-O-methyladenosine-3'-phosphate
  modified_base 20: mod_base = OTHER; note = 2'-O-methylguanosine-3'-phosphate
  modified_base 21: mod_base = OTHER; note = 2'-O-methyluridine-3'-phosphate N-[tris(GalNAc-alkyl)-amidodecanoyl)]-4-hydroxyprolinol (Hyp-(GalNAc-alkyl)3)
tcaagagggagatgggcaagt

SEQ ID NO: 7054 - RNA, 21 nt, synthetic construct
  source 1..21: mol_type = other RNA
  modified_base 1: mod_base = OTHER; note = 2'-O-methylguanosine-3'-phosphorothioate
  modified_base 2: mod_base = OTHER; note = 2'-O-methylcytidine-3'-phosphorothioate
  modified_base 3: mod_base = OTHER; note = 2'-O-methylguanosine-3'-phosphate
  modified_base 4: mod_base = OTHER; note = 2'-O-methylcytidine-3'-phosphate
  modified_base 5: mod_base = OTHER; note = 2'-O-methyluridine-3'-phosphate
  modified_base 6: mod_base = OTHER; note = 2'-O-methylguanosine-3'-phosphate
  modified_base 7: mod_base = OTHER; note = 2'-O-methyladenosine-3'-phosphate
  modified_base 8: mod_base = OTHER; note = 2'-O-methylguanosine-3'-phosphate
  modified_base 9: mod_base = OTHER; note = 2'-fluoroguanosine-3'-phosphate
  modified_base 10: mod_base = OTHER; note = 2'-fluoroguanosine-3'-phosphate
  modified_base 11: mod_base = OTHER; note = 2'-fluoroadenosine-3'-phosphate
  modified_base 12: mod_base = OTHER; note = 2'-O-methylguanosine-3'-phosphate
  modified_base 13: mod_base = OTHER; note = 2'-O-methylguanosine-3'-phosphate
  modified_base 14: mod_base = OTHER; note = 2'-O-methyladenosine-3'-phosphate
  modified_base 15: mod_base = OTHER; note = 2'-O-methyluridine-3'-phosphate
  modified_base 16: mod_base = OTHER; note = 2'-O-methylguanosine-3'-phosphate
  modified_base 17: mod_base = OTHER; note = 2'-O-methylcytidine-3'-phosphate
  modified_base 18: mod_base = OTHER; note = 2'-O-methyluridine-3'-phosphate
  modified_base 19: mod_base = OTHER; note = 2'-O-methyluridine-3'-phosphate
  modified_base 20: mod_base = OTHER; note = 2'-O-methyladenosine-3'-phosphate
  modified_base 21: mod_base = OTHER; note = 2'-O-methyluridine-3'-phosphate N-[tris(GalNAc-alkyl)-amidodecanoyl)]-4-hydroxyprolinol (Hyp-(GalNAc-alkyl)3)
gcgctgagggaggatgcttat

SEQ ID NO: 7055 - RNA, 21 nt, synthetic construct
  source 1..21: mol_type = other RNA
  modified_base 1: mod_base = OTHER; note = 2'-O-methylcytidine-3'-phosphorothioate
  modified_base 2: mod_base = OTHER; note = 2'-O-methylguanosine-3'-phosphorothioate
  modified_base 3: mod_base = OTHER; note = 2'-O-methylcytidine-3'-phosphate
  modified_base 4: mod_base = OTHER; note = 2'-O-methyluridine-3'-phosphate
  modified_base 5: mod_base = OTHER; note = 2'-O-methylguanosine-3'-phosphate
  modified_base 6: mod_base = OTHER; note = 2'-O-methyladenosine-3'-phosphate
  modified_base 7: mod_base = OTHER; note = 2'-O-methylguanosine-3'-phosphate
  modified_base 8: mod_base = OTHER; note = 2'-O-methylguanosine-3'-phosphate
  modified_base 9: mod_base = OTHER; note = 2'-fluoroguanosine-3'-phosphate
  modified_base 10: mod_base = OTHER; note = 2'-fluoroadenosine-3'-phosphate
  modified_base 11: mod_base = OTHER; note = 2'-fluoroguanosine-3'-phosphate
  modified_base 12: mod_base = OTHER; note = 2'-O-methylguanosine-3'-phosphate
  modified_base 13: mod_base = OTHER; note = 2'-O-methyladenosine-3'-phosphate
  modified_base 14: mod_base = OTHER; note = 2'-O-methyluridine-3'-phosphate
  modified_base 15: mod_base = OTHER; note = 2'-O-methylguanosine-3'-phosphate
  modified_base 16: mod_base = OTHER; note = 2'-O-methylcytidine-3'-phosphate
  modified_base 17: mod_base = OTHER; note = 2'-O-methyluridine-3'-phosphate
  modified_base 18: mod_base = OTHER; note = 2'-O-methyluridine-3'-phosphate
  modified_base 19: mod_base = OTHER; note = 2'-O-methyladenosine-3'-phosphate
  modified_base 20: mod_base = OTHER; note = 2'-O-methylguanosine-3'-phosphate
  modified_base 21: mod_base = OTHER; note = 2'-O-methyluridine-3'-phosphate N-[tris(GalNAc-alkyl)-amidodecanoyl)]-4-hydroxyprolinol (Hyp-(GalNAc-alkyl)3)
cgctgagggaggatgcttagt

SEQ ID NO: 7056 - RNA, 21 nt, synthetic construct
  source 1..21: mol_type = other RNA
  modified_base 1: mod_base = OTHER; note = 2'-O-methylguanosine-3'-phosphorothioate
  modified_base 2: mod_base = OTHER; note = 2'-O-methylcytidine-3'-phosphorothioate
  modified_base 3: mod_base = OTHER; note = 2'-O-methyladenosine-3'-phosphate
  modified_base 4: mod_base = OTHER; note = 2'-O-methylcytidine-3'-phosphate
  modified_base 5: mod_base = OTHER; note = 2'-O-methyluridine-3'-phosphate
  modified_base 6: mod_base = OTHER; note = 2'-O-methyladenosine-3'-phosphate
  modified_base 7: mod_base = OTHER; note = 2'-O-methyladenosine-3'-phosphate
  modified_base 8: mod_base = OTHER; note = 2'-O-methylguanosine-3'-phosphate
  modified_base 9: mod_base = OTHER; note = 2'-fluorocytidine-3'-phosphate
  modified_base 10: mod_base = OTHER; note = 2'-fluorocytidine-3'-phosphate
  modified_base 11: mod_base = OTHER; note = 2'-fluorouridine-3'-phosphate
  modified_base 12: mod_base = OTHER; note = 2'-O-methyladenosine-3'-phosphate
  modified_base 13: mod_base = OTHER; note = 2'-O-methyladenosine-3'-phosphate
  modified_base 14: mod_base = OTHER; note = 2'-O-methylguanosine-3'-phosphate
  modified_base 15: mod_base = OTHER; note = 2'-O-methyladenosine-3'-phosphate
  modified_base 16: mod_base = OTHER; note = 2'-O-methyladenosine-3'-phosphate
  modified_base 17: mod_base = OTHER; note = 2'-O-methylguanosine-3'-phosphate
  modified_base 18: mod_base = OTHER; note = 2'-O-methyluridine-3'-phosphate
  modified_base 19: mod_base = OTHER; note = 2'-O-methyluridine-3'-phosphate
  modified_base 20: mod_base = OTHER; note = 2'-O-methylcytidine-3'-phosphate
  modified_base 21: mod_base = OTHER; note = 2'-O-methyluridine-3'-phosphate N-[tris(GalNAc-alkyl)-amidodecanoyl)]-4-hydroxyprolinol (Hyp-(GalNAc-alkyl)3)
gcactaagcctaagaagttct

SEQ ID NO: 7057 - RNA, 21 nt, synthetic construct
  source 1..21: mol_type = other RNA
  modified_base 1: mod_base = OTHER; note = 2'-O-methylcytidine-3'-phosphorothioate
  modified_base 2: mod_base = OTHER; note = 2'-O-methyladenosine-3'-phosphorothioate
  modified_base 3: mod_base = OTHER; note = 2'-O-methylcytidine-3'-phosphate
  modified_base 4: mod_base = OTHER; note = 2'-O-methyluridine-3'-phosphate
  modified_base 5: mod_base = OTHER; note = 2'-O-methyladenosine-3'-phosphate
  modified_base 6: mod_base = OTHER; note = 2'-O-methyladenosine-3'-phosphate
  modified_base 7: mod_base = OTHER; note = 2'-O-methylguanosine-3'-phosphate
  modified_base 8: mod_base = OTHER; note = 2'-O-methylcytidine-3'-phosphate
  modified_base 9: mod_base = OTHER; note = 2'-fluorocytidine-3'-phosphate
  modified_base 10: mod_base = OTHER; note = 2'-fluorouridine-3'-phosphate
  modified_base 11: mod_base = OTHER; note = 2'-fluoroadenosine-3'-phosphate
  modified_base 12: mod_base = OTHER; note = 2'-O-methyladenosine-3'-phosphate
  modified_base 13: mod_base = OTHER; note = 2'-O-methylguanosine-3'-phosphate
  modified_base 14: mod_base = OTHER; note = 2'-O-methyladenosine-3'-phosphate
  modified_base 15: mod_base = OTHER; note = 2'-O-methyladenosine-3'-phosphate
  modified_base 16: mod_base = OTHER; note = 2'-O-methylguanosine-3'-phosphate
  modified_base 17: mod_base = OTHER; note = 2'-O-methyluridine-3'-phosphate
  modified_base 18: mod_base = OTHER; note = 2'-O-methyluridine-3'-phosphate
  modified_base 19: mod_base = OTHER; note = 2'-O-methylcytidine-3'-phosphate
  modified_base 20: mod_base = OTHER; note = 2'-O-methylcytidine-3'-phosphate
  modified_base 21: mod_base = OTHER; note = 2'-O-methyluridine-3'-phosphate N-[tris(GalNAc-alkyl)-amidodecanoyl)]-4-hydroxyprolinol (Hyp-(GalNAc-alkyl)3)
cactaagcctaagaagttcct

SEQ ID NO: 7058 - RNA, 21 nt, synthetic construct
  source 1..21: mol_type = other RNA
  modified_base 1: mod_base = OTHER; note = 2'-O-methyladenosine-3'-phosphorothioate
  modified_base 2: mod_base = OTHER; note = 2'-O-methylcytidine-3'-phosphorothioate
  modified_base 3: mod_base = OTHER; note = 2'-O-methyladenosine-3'-phosphate
  modified_base 4: mod_base = OTHER; note = 2'-O-methylguanosine-3'-phosphate
  modified_base 5: mod_base = OTHER; note = 2'-O-methylguanosine-3'-phosphate
  modified_base 6: mod_base = OTHER; note = 2'-O-methyladenosine-3'-phosphate
  modified_base 7: mod_base = OTHER; note = 2'-O-methylcytidine-3'-phosphate
  modified_base 8: mod_base = OTHER; note = 2'-O-methylcytidine-3'-phosphate
  modified_base 9: mod_base = OTHER; note = 2'-fluorocytidine-3'-phosphate
  modified_base 10: mod_base = OTHER; note = 2'-fluoroadenosine-3'-phosphate
  modified_base 11: mod_base = OTHER; note = 2'-fluorocytidine-3'-phosphate
  modified_base 12: mod_base = OTHER; note = 2'-O-methyluridine-3'-phosphate
  modified_base 13: mod_base = OTHER; note = 2'-O-methylguanosine-3'-phosphate
  modified_base 14: mod_base = OTHER; note = 2'-O-methylguanosine-3'-phosphate
  modified_base 15: mod_base = OTHER; note = 2'-O-methylguanosine-3'-phosphate
  modified_base 16: mod_base = OTHER; note = 2'-O-methyladenosine-3'-phosphate
  modified_base 17: mod_base = OTHER; note = 2'-O-methylguanosine-3'-phosphate
  modified_base 18: mod_base = OTHER; note = 2'-O-methyladenosine-3'-phosphate
  modified_base 19: mod_base = OTHER; note = 2'-O-methylcytidine-3'-phosphate
  modified_base 20: mod_base = OTHER; note = 2'-O-methyladenosine-3'-phosphate
  modified_base 21: mod_base = OTHER; note = 2'-O-methyluridine-3'-phosphate N-[tris(GalNAc-alkyl)-amidodecanoyl)]-4-hydroxyprolinol (Hyp-(GalNAc-alkyl)3)
acaggacccactgggagacat

SEQ ID NO: 7059 - RNA, 21 nt, synthetic construct
  source 1..21: mol_type = other RNA
  modified_base 1: mod_base = OTHER; note = 2'-O-methylcytidine-3'-phosphorothioate
  modified_base 2: mod_base = OTHER; note = 2'-O-methyladenosine-3'-phosphorothioate
  modified_base 3: mod_base = OTHER; note = 2'-O-methylguanosine-3'-phosphate
  modified_base 4: mod_base = OTHER; note = 2'-O-methylguanosine-3'-phosphate
  modified_base 5: mod_base = OTHER; note = 2'-O-methyladenosine-3'-phosphate
  modified_base 6: mod_base = OTHER; note = 2'-O-methylcytidine-3'-phosphate
  modified_base 7: mod_base = OTHER; note = 2'-O-methylcytidine-3'-phosphate
  modified_base 8: mod_base = OTHER; note = 2'-O-methylcytidine-3'-phosphate
  modified_base 9: mod_base = OTHER; note = 2'-fluoroadenosine-3'-phosphate
  modified_base 10: mod_base = OTHER; note = 2'-fluorocytidine-3'-phosphate
  modified_base 11: mod_base = OTHER; note = 2'-fluorouridine-3'-phosphate
  modified_base 12: mod_base = OTHER; note = 2'-O-methylguanosine-3'-phosphate
  modified_base 13: mod_base = OTHER; note = 2'-O-methylguanosine-3'-phosphate
  modified_base 14: mod_base = OTHER; note = 2'-O-methylguanosine-3'-phosphate
  modified_base 15: mod_base = OTHER; note = 2'-O-methyladenosine-3'-phosphate
  modified_base 16: mod_base = OTHER; note = 2'-O-methylguanosine-3'-phosphate
  modified_base 17: mod_base = OTHER; note = 2'-O-methyladenosine-3'-phosphate
  modified_base 18: mod_base = OTHER; note = 2'-O-methylcytidine-3'-phosphate
  modified_base 19: mod_base = OTHER; note = 2'-O-methyladenosine-3'-phosphate
  modified_base 20: mod_base = OTHER; note = 2'-O-methyladenosine-3'-phosphate
  modified_base 21: mod_base = OTHER; note = 2'-O-methyluridine-3'-phosphate N-[tris(GalNAc-alkyl)-amidodecanoyl)]-4-hydroxyprolinol (Hyp-(GalNAc-alkyl)3)
caggacccactgggagacaat

SEQ ID NO: 7060 - RNA, 21 nt, synthetic construct
  source 1..21: mol_type = other RNA
  modified_base 1: mod_base = OTHER; note = 2'-O-methyladenosine-3'-phosphorothioate
  modified_base 2: mod_base = OTHER; note = 2'-O-methylguanosine-3'-phosphorothioate
  modified_base 3: mod_base = OTHER; note = 2'-O-methylguanosine-3'-phosphate
  modified_base 4: mod_base = OTHER; note = 2'-O-methyladenosine-3'-phosphate
  modified_base 5: mod_base = OTHER; note = 2'-O-methylcytidine-3'-phosphate
  modified_base 6: mod_base = OTHER; note = 2'-O-methylcytidine-3'-phosphate
  modified_base 7: mod_base = OTHER; note = 2'-O-methylcytidine-3'-phosphate
  modified_base 8: mod_base = OTHER; note = 2'-O-methyladenosine-3'-phosphate
  modified_base 9: mod_base = OTHER; note = 2'-fluorocytidine-3'-phosphate
  modified_base 10: mod_base = OTHER; note = 2'-fluorouridine-3'-phosphate
  modified_base 11: mod_base = OTHER; note = 2'-fluoroguanosine-3'-phosphate
  modified_base 12: mod_base = OTHER; note = 2'-O-methylguanosine-3'-phosphate
  modified_base 13: mod_base = OTHER; note = 2'-O-methylguanosine-3'-phosphate
  modified_base 14: mod_base = OTHER; note = 2'-O-methyladenosine-3'-phosphate
  modified_base 15: mod_base = OTHER; note = 2'-O-methylguanosine-3'-phosphate
  modified_base 16: mod_base = OTHER; note = 2'-O-methyladenosine-3'-phosphate
  modified_base 17: mod_base = OTHER; note = 2'-O-methylcytidine-3'-phosphate
  modified_base 18: mod_base = OTHER; note = 2'-O-methyladenosine-3'-phosphate
  modified_base 19: mod_base = OTHER; note = 2'-O-methyladenosine-3'-phosphate
  modified_base 20: mod_base = OTHER; note = 2'-O-methylguanosine-3'-phosphate
  modified_base 21: mod_base = OTHER; note = 2'-O-methyluridine-3'-phosphate N-[tris(GalNAc-alkyl)-amidodecanoyl)]-4-hydroxyprolinol (Hyp-(GalNAc-alkyl)3)
aggacccactgggagacaagt

SEQ ID NO: 7061 - RNA, 21 nt, synthetic construct
  source 1..21: mol_type = other RNA
  modified_base 1: mod_base = OTHER; note = 2'-O-methylguanosine-3'-phosphorothioate
  modified_base 2: mod_base = OTHER; note = 2'-O-methylguanosine-3'-phosphorothioate
  modified_base 3: mod_base = OTHER; note = 2'-O-methyladenosine-3'-phosphate
  modified_base 4: mod_base = OTHER; note = 2'-O-methylcytidine-3'-phosphate
  modified_base 5: mod_base = OTHER; note = 2'-O-methylcytidine-3'-phosphate
  modified_base 6: mod_base = OTHER; note = 2'-O-methylcytidine-3'-phosphate
  modified_base 7: mod_base = OTHER; note = 2'-O-methyladenosine-3'-phosphate
  modified_base 8: mod_base = OTHER; note = 2'-O-methylcytidine-3'-phosphate
  modified_base 9: mod_base = OTHER; note = 2'-fluorouridine-3'-phosphate
  modified_base 10: mod_base = OTHER; note = 2'-fluoroguanosine-3'-phosphate
  modified_base 11: mod_base = OTHER; note = 2'-fluoroguanosine-3'-phosphate
  modified_base 12: mod_base = OTHER; note = 2'-O-methylguanosine-3'-phosphate
  modified_base 13: mod_base = OTHER; note = 2'-O-methyladenosine-3'-phosphate
  modified_base 14: mod_base = OTHER; note = 2'-O-methylguanosine-3'-phosphate
  modified_base 15: mod_base = OTHER; note = 2'-O-methyladenosine-3'-phosphate
  modified_base 16: mod_base = OTHER; note = 2'-O-methylcytidine-3'-phosphate
  modified_base 17: mod_base = OTHER; note = 2'-O-methyladenosine-3'-phosphate
  modified_base 18: mod_base = OTHER; note = 2'-O-methyladenosine-3'-phosphate
  modified_base 19: mod_base = OTHER; note = 2'-O-methylguanosine-3'-phosphate
  modified_base 20: mod_base = OTHER; note = 2'-O-methylcytidine-3'-phosphate
  modified_base 21: mod_base = OTHER; note = 2'-O-methyluridine-3'-phosphate N-[tris(GalNAc-alkyl)-amidodecanoyl)]-4-hydroxyprolinol (Hyp-(GalNAc-alkyl)3)
ggacccactgggagacaagct

SEQ ID NO: 7062 - RNA, 21 nt, synthetic construct
  source 1..21: mol_type = other RNA
  modified_base 1: mod_base = OTHER; note = 2'-O-methylguanosine-3'-phosphorothioate
  modified_base 2: mod_base = OTHER; note = 2'-O-methyladenosine-3'-phosphorothioate
  modified_base 3: mod_base = OTHER; note = 2'-O-methylcytidine-3'-phosphate
  modified_base 4: mod_base = OTHER; note = 2'-O-methylcytidine-3'-phosphate
  modified_base 5: mod_base = OTHER; note = 2'-O-methylcytidine-3'-phosphate
  modified_base 6: mod_base = OTHER; note = 2'-O-methyladenosine-3'-phosphate
  modified_base 7: mod_base = OTHER; note = 2'-O-methylcytidine-3'-phosphate
  modified_base 8: mod_base = OTHER; note = 2'-O-methyluridine-3'-phosphate
  modified_base 9: mod_base = OTHER; note = 2'-fluoroguanosine-3'-phosphate
  modified_base 10: mod_base = OTHER; note = 2'-fluoroguanosine-3'-phosphate
  modified_base 11: mod_base = OTHER; note = 2'-fluoroguanosine-3'-phosphate
  modified_base 12: mod_base = OTHER; note = 2'-O-methyladenosine-3'-phosphate
  modified_base 13: mod_base = OTHER; note = 2'-O-methylguanosine-3'-phosphate
  modified_base 14: mod_base = OTHER; note = 2'-O-methyladenosine-3'-phosphate
  modified_base 15: mod_base = OTHER; note = 2'-O-methylcytidine-3'-phosphate
  modified_base 16: mod_base = OTHER; note = 2'-O-methyladenosine-3'-phosphate
  modified_base 17: mod_base = OTHER; note = 2'-O-methyladenosine-3'-phosphate
  modified_base 18: mod_base = OTHER; note = 2'-O-methylguanosine-3'-phosphate
  modified_base 19: mod_base = OTHER; note = 2'-O-methylcytidine-3'-phosphate
  modified_base 20: mod_base = OTHER; note = 2'-O-methyladenosine-3'-phosphate
  modified_base 21: mod_base = OTHER; note = 2'-O-methyluridine-3'-phosphate N-[tris(GalNAc-alkyl)-amidodecanoyl)]-4-hydroxyprolinol (Hyp-(GalNAc-alkyl)3)
gacccactgggagacaagcat

SEQ ID NO: 7063 - RNA, 21 nt, synthetic construct
  source 1..21: mol_type = other RNA
  modified_base 1: mod_base = OTHER; note = 2'-O-methyladenosine-3'-phosphorothioate
  modified_base 2: mod_base = OTHER; note = 2'-O-methylcytidine-3'-phosphorothioate
  modified_base 3: mod_base = OTHER; note = 2'-O-methylcytidine-3'-phosphate
  modified_base 4: mod_base = OTHER; note = 2'-O-methylcytidine-3'-phosphate
  modified_base 5: mod_base = OTHER; note = 2'-O-methyladenosine-3'-phosphate
  modified_base 6: mod_base = OTHER; note = 2'-O-methylcytidine-3'-phosphate
  modified_base 7: mod_base = OTHER; note = 2'-O-methyluridine-3'-phosphate
  modified_base 8: mod_base = OTHER; note = 2'-O-methylguanosine-3'-phosphate
  modified_base 9: mod_base = OTHER; note = 2'-fluoroguanosine-3'-phosphate
  modified_base 10: mod_base = OTHER; note = 2'-fluoroguanosine-3'-phosphate
  modified_base 11: mod_base = OTHER; note = 2'-fluoroadenosine-3'-phosphate
  modified_base 12: mod_base = OTHER; note = 2'-O-methylguanosine-3'-phosphate
  modified_base 13: mod_base = OTHER; note = 2'-O-methyladenosine-3'-phosphate
  modified_base 14: mod_base = OTHER; note = 2'-O-methylcytidine-3'-phosphate
  modified_base 15: mod_base = OTHER; note = 2'-O-methyladenosine-3'-phosphate
  modified_base 16: mod_base = OTHER; note = 2'-O-methyladenosine-3'-phosphate
  modified_base 17: mod_base = OTHER; note = 2'-O-methylguanosine-3'-phosphate
  modified_base 18: mod_base = OTHER; note = 2'-O-methylcytidine-3'-phosphate
  modified_base 19: mod_base = OTHER; note = 2'-O-methyladenosine-3'-phosphate
  modified_base 20: mod_base = OTHER; note = 2'-O-methyluridine-3'-phosphate
  modified_base 21: mod_base = OTHER; note = 2'-O-methyluridine-3'-phosphate N-[tris(GalNAc-alkyl)-amidodecanoyl)]-4-hydroxyprolinol (Hyp-(GalNAc-alkyl)3)
acccactgggagacaagcatt

SEQ ID NO: 7064 - RNA, 21 nt, synthetic construct
  source 1..21: mol_type = other RNA
  modified_base 1: mod_base = OTHER; note = 2'-O-methylcytidine-3'-phosphorothioate
  modified_base 2: mod_base = OTHER; note = 2'-O-methylcytidine-3'-phosphorothioate
  modified_base 3: mod_base = OTHER; note = 2'-O-methylcytidine-3'-phosphate
  modified_base 4: mod_base = OTHER; note = 2'-O-methyladenosine-3'-phosphate
  modified_base 5: mod_base = OTHER; note = 2'-O-methylcytidine-3'-phosphate
  modified_base 6: mod_base = OTHER; note = 2'-O-methyluridine-3'-phosphate
  modified_base 7: mod_base = OTHER; note = 2'-O-methylguanosine-3'-phosphate
  modified_base 8: mod_base = OTHER; note = 2'-O-methylguanosine-3'-phosphate
  modified_base 9: mod_base = OTHER; note = 2'-fluoroguanosine-3'-phosphate
  modified_base 10: mod_base = OTHER; note = 2'-fluoroadenosine-3'-phosphate
  modified_base 11: mod_base = OTHER; note = 2'-fluoroguanosine-3'-phosphate
  modified_base 12: mod_base = OTHER; note = 2'-O-methyladenosine-3'-phosphate
  modified_base 13: mod_base = OTHER; note = 2'-O-methylcytidine-3'-phosphate
  modified_base 14: mod_base = OTHER; note = 2'-O-methyladenosine-3'-phosphate
  modified_base 15: mod_base = OTHER; note = 2'-O-methyladenosine-3'-phosphate
  modified_base 16: mod_base = OTHER; note = 2'-O-methylguanosine-3'-phosphate
  modified_base 17: mod_base = OTHER; note = 2'-O-methylcytidine-3'-phosphate
  modified_base 18: mod_base = OTHER; note = 2'-O-methyladenosine-3'-phosphate
  modified_base 19: mod_base = OTHER; note = 2'-O-methyluridine-3'-phosphate
  modified_base 20: mod_base = OTHER; note = 2'-O-methyluridine-3'-phosphate
  modified_base 21: mod_base = OTHER; note = 2'-O-methyluridine-3'-phosphate N-[tris(GalNAc-alkyl)-amidodecanoyl)]-4-hydroxyprolinol (Hyp-(GalNAc-alkyl)3)
cccactgggagacaagcattt

SEQ ID NO: 7065 - RNA, 21 nt, synthetic construct
  source 1..21: mol_type = other RNA
  modified_base 1: mod_base = OTHER; note = 2'-O-methylcytidine-3'-phosphorothioate
  modified_base 2: mod_base = OTHER; note = 2'-O-methylcytidine-3'-phosphorothioate
  modified_base 3: mod_base = OTHER; note = 2'-O-methyladenosine-3'-phosphate
  modified_base 4: mod_base = OTHER; note = 2'-O-methylcytidine-3'-phosphate
  modified_base 5: mod_base = OTHER; note = 2'-O-methyluridine-3'-phosphate
  modified_base 6: mod_base = OTHER; note = 2'-O-methylguanosine-3'-phosphate
  modified_base 7: mod_base = OTHER; note = 2'-O-methylguanosine-3'-phosphate
  modified_base 8: mod_base = OTHER; note = 2'-O-methylguanosine-3'-phosphate
  modified_base 9: mod_base = OTHER; note = 2'-fluoroadenosine-3'-phosphate
  modified_base 10: mod_base = OTHER; note = 2'-fluoroguanosine-3'-phosphate
  modified_base 11: mod_base = OTHER; note = 2'-fluoroadenosine-3'-phosphate
  modified_base 12: mod_base = OTHER; note = 2'-O-methylcytidine-3'-phosphate
  modified_base 13: mod_base = OTHER; note = 2'-O-methyladenosine-3'-phosphate
  modified_base 14: mod_base = OTHER; note = 2'-O-methyladenosine-3'-phosphate
  modified_base 15: mod_base = OTHER; note = 2'-O-methylguanosine-3'-phosphate
  modified_base 16: mod_base = OTHER; note = 2'-O-methylcytidine-3'-phosphate
  modified_base 17: mod_base = OTHER; note = 2'-O-methyladenosine-3'-phosphate
  modified_base 18: mod_base = OTHER; note = 2'-O-methyluridine-3'-phosphate
  modified_base 19: mod_base = OTHER; note = 2'-O-methyluridine-3'-phosphate
  modified_base 20: mod_base = OTHER; note = 2'-O-methyluridine-3'-phosphate
  modified_base 21: mod_base = OTHER; note = 2'-O-methyluridine-3'-phosphate N-[tris(GalNAc-alkyl)-amidodecanoyl)]-4-hydroxyprolinol (Hyp-(GalNAc-alkyl)3)
ccactgggagacaagcatttt

SEQ ID NO: 7066 - RNA, 21 nt, synthetic construct
  source 1..21: mol_type = other RNA
  modified_base 1: mod_base = OTHER; note = 2'-O-methylcytidine-3'-phosphorothioate
  modified_base 2: mod_base = OTHER; note = 2'-O-methyladenosine-3'-phosphorothioate
  modified_base 3: mod_base = OTHER; note = 2'-O-methylcytidine-3'-phosphate
  modified_base 4: mod_base = OTHER; note = 2'-O-methyluridine-3'-phosphate
  modified_base 5: mod_base = OTHER; note = 2'-O-methylguanosine-3'-phosphate
  modified_base 6: mod_base = OTHER; note = 2'-O-methylguanosine-3'-phosphate
  modified_base 7: mod_base = OTHER; note = 2'-O-methylguanosine-3'-phosphate
  modified_base 8: mod_base = OTHER; note = 2'-O-methyladenosine-3'-phosphate
  modified_base 9: mod_base = OTHER; note = 2'-fluoroguanosine-3'-phosphate
  modified_base 10: mod_base = OTHER; note = 2'-fluoroadenosine-3'-phosphate
  modified_base 11: mod_base = OTHER; note = 2'-fluorocytidine-3'-phosphate
  modified_base 12: mod_base = OTHER; note = 2'-O-methyladenosine-3'-phosphate
  modified_base 13: mod_base = OTHER; note = 2'-O-methyladenosine-3'-phosphate
  modified_base 14: mod_base = OTHER; note = 2'-O-methylguanosine-3'-phosphate
  modified_base 15: mod_base = OTHER; note = 2'-O-methylcytidine-3'-phosphate
  modified_base 16: mod_base = OTHER; note = 2'-O-methyladenosine-3'-phosphate
  modified_base 17: mod_base = OTHER; note = 2'-O-methyluridine-3'-phosphate
  modified_base 18: mod_base = OTHER; note = 2'-O-methyluridine-3'-phosphate
  modified_base 19: mod_base = OTHER; note = 2'-O-methyluridine-3'-phosphate
  modified_base 20: mod_base = OTHER; note = 2'-O-methyladenosine-3'-phosphate
  modified_base 21: mod_base = OTHER; note = 2'-O-methyluridine-3'-phosphate N-[tris(GalNAc-alkyl)-amidodecanoyl)]-4-hydroxyprolinol (Hyp-(GalNAc-alkyl)3)
cactgggagacaagcatttat

SEQ ID NO: 7067 - RNA, 21 nt, synthetic construct
  source 1..21: mol_type = other RNA
  modified_base 1: mod_base = OTHER; note = 2'-O-methyladenosine-3'-phosphorothioate
  modified_base 2: mod_base = OTHER; note = 2'-O-methylcytidine-3'-phosphorothioate
  modified_base 3: mod_base = OTHER; note = 2'-O-methyluridine-3'-phosphate
  modified_base 4: mod_base = OTHER; note = 2'-O-methylguanosine-3'-phosphate
  modified_base 5: mod_base = OTHER; note = 2'-O-methylguanosine-3'-phosphate
  modified_base 6: mod_base = OTHER; note = 2'-O-methylguanosine-3'-phosphate
  modified_base 7: mod_base = OTHER; note = 2'-O-methyladenosine-3'-phosphate
  modified_base 8: mod_base = OTHER; note = 2'-O-methylguanosine-3'-phosphate
  modified_base 9: mod_base = OTHER; note = 2'-fluoroadenosine-3'-phosphate
  modified_base 10: mod_base = OTHER; note = 2'-fluorocytidine-3'-phosphate
  modified_base 11: mod_base = OTHER; note = 2'-fluoroadenosine-3'-phosphate
  modified_base 12: mod_base = OTHER; note = 2'-O-methyladenosine-3'-phosphate
  modified_base 13: mod_base = OTHER; note = 2'-O-methylguanosine-3'-phosphate
  modified_base 14: mod_base = OTHER; note = 2'-O-methylcytidine-3'-phosphate
  modified_base 15: mod_base = OTHER; note = 2'-O-methyladenosine-3'-phosphate
  modified_base 16: mod_base = OTHER; note = 2'-O-methyluridine-3'-phosphate
  modified_base 17: mod_base = OTHER; note = 2'-O-methyluridine-3'-phosphate
  modified_base 18: mod_base = OTHER; note = 2'-O-methyluridine-3'-phosphate
  modified_base 19: mod_base = OTHER; note = 2'-O-methyladenosine-3'-phosphate
  modified_base 20: mod_base = OTHER; note = 2'-O-methyluridine-3'-phosphate
  modified_base 21: mod_base = OTHER; note = 2'-O-methyluridine-3'-phosphate N-[tris(GalNAc-alkyl)-amidodecanoyl)]-4-hydroxyprolinol (Hyp-(GalNAc-alkyl)3)
actgggagacaagcatttatt

SEQ ID NO: 7068 - RNA, 21 nt, synthetic construct
  source 1..21: mol_type = other RNA
  modified_base 1: mod_base = OTHER; note = 2'-O-methylcytidine-3'-phosphorothioate
  modified_base 2: mod_base = OTHER; note = 2'-O-methyluridine-3'-phosphorothioate
  modified_base 3: mod_base = OTHER; note = 2'-O-methylguanosine-3'-phosphate
  modified_base 4: mod_base = OTHER; note = 2'-O-methylguanosine-3'-phosphate
  modified_base 5: mod_base = OTHER; note = 2'-O-methylguanosine-3'-phosphate
  modified_base 6: mod_base = OTHER; note = 2'-O-methyladenosine-3'-phosphate
  modified_base 7: mod_base = OTHER; note = 2'-O-methylguanosine-3'-phosphate
  modified_base 8: mod_base = OTHER; note = 2'-O-methyladenosine-3'-phosphate
  modified_base 9: mod_base = OTHER; note = 2'-fluorocytidine-3'-phosphate
  modified_base 10: mod_base = OTHER; note = 2'-fluoroadenosine-3'-phosphate
  modified_base 11: mod_base = OTHER; note = 2'-fluoroadenosine-3'-phosphate
  modified_base 12: mod_base = OTHER; note = 2'-O-methylguanosine-3'-phosphate
  modified_base 13: mod_base = OTHER; note = 2'-O-methylcytidine-3'-phosphate
  modified_base 14: mod_base = OTHER; note = 2'-O-methyladenosine-3'-phosphate
  modified_base 15: mod_base = OTHER; note = 2'-O-methyluridine-3'-phosphate
  modified_base 16: mod_base = OTHER; note = 2'-O-methyluridine-3'-phosphate
  modified_base 17: mod_base = OTHER; note = 2'-O-methyluridine-3'-phosphate
  modified_base 18: mod_base = OTHER; note = 2'-O-methyladenosine-3'-phosphate
  modified_base 19: mod_base = OTHER; note = 2'-O-methyluridine-3'-phosphate
  modified_base 20: mod_base = OTHER; note = 2'-O-methyladenosine-3'-phosphate
  modified_base 21: mod_base = OTHER; note = 2'-O-methyluridine-3'-phosphate N-[tris(GalNAc-alkyl)-amidodecanoyl)]-4-hydroxyprolinol (Hyp-(GalNAc-alkyl)3)
ctgggagacaagcatttatat

SEQ ID NO: 7069 - RNA, 21 nt, synthetic construct
  source 1..21: mol_type = other RNA
  modified_base 1: mod_base = OTHER; note = 2'-O-methyluridine-3'-phosphorothioate
  modified_base 2: mod_base = OTHER; note = 2'-O-methylguanosine-3'-phosphorothioate
  modified_base 3: mod_base = OTHER; note = 2'-O-methylguanosine-3'-phosphate
  modified_base 4: mod_base = OTHER; note = 2'-O-methylguanosine-3'-phosphate
  modified_base 5: mod_base = OTHER; note = 2'-O-methyladenosine-3'-phosphate
  modified_base 6: mod_base = OTHER; note = 2'-O-methylguanosine-3'-phosphate
  modified_base 7: mod_base = OTHER; note = 2'-O-methyladenosine-3'-phosphate
  modified_base 8: mod_base = OTHER; note = 2'-O-methylcytidine-3'-phosphate
  modified_base 9: mod_base = OTHER; note = 2'-fluoroadenosine-3'-phosphate
  modified_base 10: mod_base = OTHER; note = 2'-fluoroadenosine-3'-phosphate
  modified_base 11: mod_base = OTHER; note = 2'-fluoroguanosine-3'-phosphate
  modified_base 12: mod_base = OTHER; note = 2'-O-methylcytidine-3'-phosphate
  modified_base 13: mod_base = OTHER; note = 2'-O-methyladenosine-3'-phosphate
  modified_base 14: mod_base = OTHER; note = 2'-O-methyluridine-3'-phosphate
  modified_base 15: mod_base = OTHER; note = 2'-O-methyluridine-3'-phosphate
  modified_base 16: mod_base = OTHER; note = 2'-O-methyluridine-3'-phosphate
  modified_base 17: mod_base = OTHER; note = 2'-O-methyladenosine-3'-phosphate
  modified_base 18: mod_base = OTHER; note = 2'-O-methyluridine-3'-phosphate
  modified_base 19: mod_base = OTHER; note = 2'-O-methyladenosine-3'-phosphate
  modified_base 20: mod_base = OTHER; note = 2'-O-methylcytidine-3'-phosphate
  modified_base 21: mod_base = OTHER; note = 2'-O-methyluridine-3'-phosphate N-[tris(GalNAc-alkyl)-amidodecanoyl)]-4-hydroxyprolinol (Hyp-(GalNAc-alkyl)3)
tgggagacaagcatttatact

SEQ ID NO: 7070 - RNA, 21 nt, synthetic construct
  source 1..21: mol_type = other RNA
  modified_base 1: mod_base = OTHER; note = 2'-O-methylguanosine-3'-phosphorothioate
  modified_base 2: mod_base = OTHER; note = 2'-O-methylguanosine-3'-phosphorothioate
  modified_base 3: mod_base = OTHER; note = 2'-O-methyladenosine-3'-phosphate
  modified_base 4: mod_base = OTHER; note = 2'-O-methylguanosine-3'-phosphate
  modified_base 5: mod_base = OTHER; note = 2'-O-methyladenosine-3'-phosphate
  modified_base 6: mod_base = OTHER; note = 2'-O-methylcytidine-3'-phosphate
  modified_base 7: mod_base = OTHER; note = 2'-O-methyladenosine-3'-phosphate
  modified_base 8: mod_base = OTHER; note = 2'-O-methyladenosine-3'-phosphate
  modified_base 9: mod_base = OTHER; note = 2'-fluoroguanosine-3'-phosphate
  modified_base 10: mod_base = OTHER; note = 2'-fluorocytidine-3'-phosphate
  modified_base 11: mod_base = OTHER; note = 2'-fluoroadenosine-3'-phosphate
  modified_base 12: mod_base = OTHER; note = 2'-O-methyluridine-3'-phosphate
  modified_base 13: mod_base = OTHER; note = 2'-O-methyluridine-3'-phosphate
  modified_base 14: mod_base = OTHER; note = 2'-O-methyluridine-3'-phosphate
  modified_base 15: mod_base = OTHER; note = 2'-O-methyladenosine-3'-phosphate
  modified_base 16: mod_base = OTHER; note = 2'-O-methyluridine-3'-phosphate
  modified_base 17: mod_base = OTHER; note = 2'-O-methyladenosine-3'-phosphate
  modified_base 18: mod_base = OTHER; note = 2'-O-methylcytidine-3'-phosphate
  modified_base 19: mod_base = OTHER; note = 2'-O-methyluridine-3'-phosphate
  modified_base 20: mod_base = OTHER; note = 2'-O-methyluridine-3'-phosphate
  modified_base 21: mod_base = OTHER; note = 2'-O-methyluridine-3'-phosphate N-[tris(GalNAc-alkyl)-amidodecanoyl)]-4-hydroxyprolinol (Hyp-(GalNAc-alkyl)3)
ggagacaagcatttatacttt

SEQ ID NO: 7071 - RNA, 21 nt, synthetic construct
  source 1..21: mol_type = other RNA
  modified_base 1: mod_base = OTHER; note = 2'-O-methylguanosine-3'-phosphorothioate
  modified_base 2: mod_base = OTHER; note = 2'-O-methyladenosine-3'-phosphorothioate
  modified_base 3: mod_base = OTHER; note = 2'-O-methylguanosine-3'-phosphate
  modified_base 4: mod_base = OTHER; note = 2'-O-methyladenosine-3'-phosphate
  modified_base 5: mod_base = OTHER; note = 2'-O-methylcytidine-3'-phosphate
  modified_base 6: mod_base = OTHER; note = 2'-O-methyladenosine-3'-phosphate
  modified_base 7: mod_base = OTHER; note = 2'-O-methyladenosine-3'-phosphate
  modified_base 8: mod_base = OTHER; note = 2'-O-methylguanosine-3'-phosphate
  modified_base 9: mod_base = OTHER; note = 2'-fluorocytidine-3'-phosphate
  modified_base 10: mod_base = OTHER; note = 2'-fluoroadenosine-3'-phosphate
  modified_base 11: mod_base = OTHER; note = 2'-fluorouridine-3'-phosphate
  modified_base 12: mod_base = OTHER; note = 2'-O-methyluridine-3'-phosphate
  modified_base 13: mod_base = OTHER; note = 2'-O-methyluridine-3'-phosphate
  modified_base 14: mod_base = OTHER; note = 2'-O-methyladenosine-3'-phosphate
  modified_base 15: mod_base = OTHER; note = 2'-O-methyluridine-3'-phosphate
  modified_base 16: mod_base = OTHER; note = 2'-O-methyladenosine-3'-phosphate
  modified_base 17: mod_base = OTHER; note = 2'-O-methylcytidine-3'-phosphate
  modified_base 18: mod_base = OTHER; note = 2'-O-methyluridine-3'-phosphate
  modified_base 19: mod_base = OTHER; note = 2'-O-methyluridine-3'-phosphate
  modified_base 20: mod_base = OTHER; note = 2'-O-methyluridine-3'-phosphate
  modified_base 21: mod_base = OTHER; note = 2'-O-methyluridine-3'-phosphate N-[tris(GalNAc-alkyl)-amidodecanoyl)]-4-hydroxyprolinol (Hyp-(GalNAc-alkyl)3)
gagacaagcatttatactttt

SEQ ID NO: 7072 - RNA, 21 nt, synthetic construct
  source 1..21: mol_type = other RNA
  modified_base 1: mod_base = OTHER; note = 2'-O-methyladenosine-3'-phosphorothioate
  modified_base 2: mod_base = OTHER; note = 2'-O-methylguanosine-3'-phosphorothioate
  modified_base 3: mod_base = OTHER; note = 2'-O-methyladenosine-3'-phosphate
  modified_base 4: mod_base = OTHER; note = 2'-O-methylcytidine-3'-phosphate
  modified_base 5: mod_base = OTHER; note = 2'-O-methyladenosine-3'-phosphate
  modified_base 6: mod_base = OTHER; note = 2'-O-methyladenosine-3'-phosphate
  modified_base 7: mod_base = OTHER; note = 2'-O-methylguanosine-3'-phosphate
  modified_base 8: mod_base = OTHER; note = 2'-O-methylcytidine-3'-phosphate
  modified_base 9: mod_base = OTHER; note = 2'-fluoroadenosine-3'-phosphate
  modified_base 10: mod_base = OTHER; note = 2'-fluorouridine-3'-phosphate
  modified_base 11: mod_base = OTHER; note = 2'-fluorouridine-3'-phosphate
  modified_base 12: mod_base = OTHER; note = 2'-O-methyluridine-3'-phosphate
  modified_base 13: mod_base = OTHER; note = 2'-O-methyladenosine-3'-phosphate
  modified_base 14: mod_base = OTHER; note = 2'-O-methyluridine-3'-phosphate
  modified_base 15: mod_base = OTHER; note = 2'-O-methyladenosine-3'-phosphate
  modified_base 16: mod_base = OTHER; note = 2'-O-methylcytidine-3'-phosphate
  modified_base 17: mod_base = OTHER; note = 2'-O-methyluridine-3'-phosphate
  modified_base 18: mod_base = OTHER; note = 2'-O-methyluridine-3'-phosphate
  modified_base 19: mod_base = OTHER; note = 2'-O-methyluridine-3'-phosphate
  modified_base 20: mod_base = OTHER; note = 2'-O-methylcytidine-3'-phosphate
  modified_base 21: mod_base = OTHER; note = 2'-O-methyluridine-3'-phosphate N-[tris(GalNAc-alkyl)-amidodecanoyl)]-4-hydroxyprolinol (Hyp-(GalNAc-alkyl)3)
agacaagcatttatactttct

SEQ ID NO: 7073 - RNA, 21 nt, synthetic construct
  source 1..21: mol_type = other RNA
  modified_base 1: mod_base = OTHER; note = 2'-O-methylguanosine-3'-phosphorothioate
  modified_base 2: mod_base = OTHER; note = 2'-O-methyladenosine-3'-phosphorothioate
  modified_base 3: mod_base = OTHER; note = 2'-O-methylcytidine-3'-phosphate
  modified_base 4: mod_base = OTHER; note = 2'-O-methyladenosine-3'-phosphate
  modified_base 5: mod_base = OTHER; note = 2'-O-methyladenosine-3'-phosphate
  modified_base 6: mod_base = OTHER; note = 2'-O-methylguanosine-3'-phosphate
  modified_base 7: mod_base = OTHER; note = 2'-O-methylcytidine-3'-phosphate
  modified_base 8: mod_base = OTHER; note = 2'-O-methyladenosine-3'-phosphate
  modified_base 9: mod_base = OTHER; note = 2'-fluorouridine-3'-phosphate
  modified_base 10: mod_base = OTHER; note = 2'-fluorouridine-3'-phosphate
  modified_base 11: mod_base = OTHER; note = 2'-fluorouridine-3'-phosphate
  modified_base 12: mod_base = OTHER; note = 2'-O-methyladenosine-3'-phosphate
  modified_base 13: mod_base = OTHER; note = 2'-O-methyluridine-3'-phosphate
  modified_base 14: mod_base = OTHER; note = 2'-O-methyladenosine-3'-phosphate
  modified_base 15: mod_base = OTHER; note = 2'-O-methylcytidine-3'-phosphate
  modified_base 16: mod_base = OTHER; note = 2'-O-methyluridine-3'-phosphate
  modified_base 17: mod_base = OTHER; note = 2'-O-methyluridine-3'-phosphate
  modified_base 18: mod_base = OTHER; note = 2'-O-methyluridine-3'-phosphate
  modified_base 19: mod_base = OTHER; note = 2'-O-methylcytidine-3'-phosphate
  modified_base 20: mod_base = OTHER; note = 2'-O-methyluridine-3'-phosphate
  modified_base 21: mod_base = OTHER; note = 2'-O-methyluridine-3'-phosphate N-[tris(GalNAc-alkyl)-amidodecanoyl)]-4-hydroxyprolinol (Hyp-(GalNAc-alkyl)3)
gacaagcatttatactttctt

SEQ ID NO: 7074 - RNA, 21 nt, synthetic construct
  source 1..21: mol_type = other RNA
  modified_base 1: mod_base = OTHER; note = 2'-O-methyladenosine-3'-phosphorothioate
  modified_base 2: mod_base = OTHER; note = 2'-O-methylcytidine-3'-phosphorothioate
  modified_base 3: mod_base = OTHER; note = 2'-O-methyladenosine-3'-phosphate
  modified_base 4: mod_base = OTHER; note = 2'-O-methyladenosine-3'-phosphate
  modified_base 5: mod_base = OTHER; note = 2'-O-methylguanosine-3'-phosphate
  modified_base 6: mod_base = OTHER; note = 2'-O-methylcytidine-3'-phosphate
  modified_base 7: mod_base = OTHER; note = 2'-O-methyladenosine-3'-phosphate
  modified_base 8: mod_base = OTHER; note = 2'-O-methyluridine-3'-phosphate
  modified_base 9: mod_base = OTHER; note = 2'-fluorouridine-3'-phosphate
  modified_base 10: mod_base = OTHER; note = 2'-fluorouridine-3'-phosphate
  modified_base 11: mod_base = OTHER; note = 2'-fluoroadenosine-3'-phosphate
  modified_base 12: mod_base = OTHER; note = 2'-O-methyluridine-3'-phosphate
  modified_base 13: mod_base = OTHER; note = 2'-O-methyladenosine-3'-phosphate
  modified_base 14: mod_base = OTHER; note = 2'-O-methylcytidine-3'-phosphate
  modified_base 15: mod_base = OTHER; note = 2'-O-methyluridine-3'-phosphate
  modified_base 16: mod_base = OTHER; note = 2'-O-methyluridine-3'-phosphate
  modified_base 17: mod_base = OTHER; note = 2'-O-methyluridine-3'-phosphate
  modified_base 18: mod_base = OTHER; note = 2'-O-methylcytidine-3'-phosphate
  modified_base 19: mod_base = OTHER; note = 2'-O-methyluridine-3'-phosphate
  modified_base 20: mod_base = OTHER; note = 2'-O-methyluridine-3'-phosphate
  modified_base 21: mod_base = OTHER; note = 2'-O-methyluridine-3'-phosphate N-[tris(GalNAc-alkyl)-amidodecanoyl)]-4-hydroxyprolinol (Hyp-(GalNAc-alkyl)3)
acaagcatttatactttcttt

SEQ ID NO: 7075 - RNA, 21 nt, synthetic construct
  source 1..21: mol_type = other RNA
  modified_base 1: mod_base = OTHER; note = 2'-O-methylcytidine-3'-phosphorothioate
  modified_base 2: mod_base = OTHER; note = 2'-O-methyladenosine-3'-phosphorothioate
  modified_base 3: mod_base = OTHER; note = 2'-O-methyladenosine-3'-phosphate
  modified_base 4: mod_base = OTHER; note = 2'-O-methylguanosine-3'-phosphate
  modified_base 5: mod_base = OTHER; note = 2'-O-methylcytidine-3'-phosphate
  modified_base 6: mod_base = OTHER; note = 2'-O-methyladenosine-3'-phosphate
  modified_base 7: mod_base = OTHER; note = 2'-O-methyluridine-3'-phosphate
  modified_base 8: mod_base = OTHER; note = 2'-O-methyluridine-3'-phosphate
  modified_base 9: mod_base = OTHER; note = 2'-fluorouridine-3'-phosphate
  modified_base 10: mod_base = OTHER; note = 2'-fluoroadenosine-3'-phosphate
  modified_base 11: mod_base = OTHER; note = 2'-fluorouridine-3'-phosphate
  modified_base 12: mod_base = OTHER; note = 2'-O-methyladenosine-3'-phosphate
  modified_base 13: mod_base = OTHER; note = 2'-O-methylcytidine-3'-phosphate
  modified_base 14: mod_base = OTHER; note = 2'-O-methyluridine-3'-phosphate
  modified_base 15: mod_base = OTHER; note = 2'-O-methyluridine-3'-phosphate
  modified_base 16: mod_base = OTHER; note = 2'-O-methyluridine-3'-phosphate
  modified_base 17: mod_base = OTHER; note = 2'-O-methylcytidine-3'-phosphate
  modified_base 18: mod_base = OTHER; note = 2'-O-methyluridine-3'-phosphate
  modified_base 19: mod_base = OTHER; note = 2'-O-methyluridine-3'-phosphate
  modified_base 20: mod_base = OTHER; note = 2'-O-methyluridine-3'-phosphate
  modified_base 21: mod_base = OTHER; note = 2'-O-methyluridine-3'-phosphate N-[tris(GalNAc-alkyl)-amidodecanoyl)]-4-hydroxyprolinol (Hyp-(GalNAc-alkyl)3)
caagcatttatactttctttt

SEQ ID NO: 7076 - RNA, 21 nt, synthetic construct
  source 1..21: mol_type = other RNA
  modified_base 1: mod_base = OTHER; note = 2'-O-methylcytidine-3'-phosphorothioate
  modified_base 2: mod_base = OTHER; note = 2'-O-methylcytidine-3'-phosphorothioate
  modified_base 3: mod_base = OTHER; note = 2'-O-methyladenosine-3'-phosphate
  modified_base 4: mod_base = OTHER; note = 2'-O-methylguanosine-3'-phosphate
  modified_base 5: mod_base = OTHER; note = 2'-O-methyladenosine-3'-phosphate
  modified_base 6: mod_base = OTHER; note = 2'-O-methylcytidine-3'-phosphate
  modified_base 7: mod_base = OTHER; note = 2'-fluoroadenosine-3'-phosphate
  modified_base 8: mod_base = OTHER; note = 2'-O-methyluridine-3'-phosphate
  modified_base 9: mod_base = OTHER; note = 2'-fluoroguanosine-3'-phosphate
  modified_base 10: mod_base = OTHER; note = 2'-fluoroadenosine-3'-phosphate
  modified_base 11: mod_base = OTHER; note = 2'-fluoroguanosine-3'-phosphate
  modified_base 12: mod_base = OTHER; note = 2'-O-methylcytidine-3'-phosphate
  modified_base 13: mod_base = OTHER; note = 2'-O-methyluridine-3'-phosphate
  modified_base 14: mod_base = OTHER; note = 2'-O-methylguanosine-3'-phosphate
  modified_base 15: mod_base = OTHER; note = 2'-O-methyluridine-3'-phosphate
  modified_base 16: mod_base = OTHER; note = 2'-O-methylguanosine-3'-phosphate
  modified_base 17: mod_base = OTHER; note = 2'-O-methyladenosine-3'-phosphate
  modified_base 18: mod_base = OTHER; note = 2'-O-methylguanosine-3'-phosphate
  modified_base 19: mod_base = OTHER; note = 2'-O-methylguanosine-3'-phosphate
  modified_base 20: mod_base = OTHER; note = 2'-O-methylguanosine-3'-phosphate
  modified_base 21: mod_base = OTHER; note = 2'-O-methyluridine-3'-phosphate N-[tris(GalNAc-alkyl)-amidodecanoyl)]-4-hydroxyprolinol (Hyp-(GalNAc-alkyl)3)
ccagacatgagctgtgagggt

SEQ ID NO: 7077 - RNA, 21 nt, synthetic construct
  source 1..21: mol_type = other RNA
  modified_base 1: mod_base = OTHER; note = 2'-O-methyladenosine-3'-phosphorothioate
  modified_base 2: mod_base = OTHER; note = 2'-O-methylguanosine-3'-phosphorothioate
  modified_base 3: mod_base = OTHER; note = 2'-O-methyladenosine-3'-phosphate
  modified_base 4: mod_base = OTHER; note = 2'-O-methylcytidine-3'-phosphate
  modified_base 5: mod_base = OTHER; note = 2'-O-methyladenosine-3'-phosphate
  modified_base 6: mod_base = OTHER; note = 2'-O-methyluridine-3'-phosphate
  modified_base 7: mod_base = OTHER; note = 2'-fluoroguanosine-3'-phosphate
  modified_base 8: mod_base = OTHER; note = 2'-O-methyladenosine-3'-phosphate
  modified_base 9: mod_base = OTHER; note = 2'-fluoroguanosine-3'-phosphate
  modified_base 10: mod_base = OTHER; note = 2'-fluorocytidine-3'-phosphate
  modified_base 11: mod_base = OTHER; note = 2'-fluorouridine-3'-phosphate
  modified_base 12: mod_base = OTHER; note = 2'-O-methylguanosine-3'-phosphate
  modified_base 13: mod_base = OTHER; note = 2'-O-methyluridine-3'-phosphate
  modified_base 14: mod_base = OTHER; note = 2'-O-methylguanosine-3'-phosphate
  modified_base 15: mod_base = OTHER; note = 2'-O-methyladenosine-3'-phosphate
  modified_base 16: mod_base = OTHER; note = 2'-O-methylguanosine-3'-phosphate
  modified_base 17: mod_base = OTHER; note = 2'-O-methylguanosine-3'-phosphate
  modified_base 18: mod_base = OTHER; note = 2'-O-methylguanosine-3'-phosphate
  modified_base 19: mod_base = OTHER; note = 2'-O-methyluridine-3'-phosphate
  modified_base 20: mod_base = OTHER; note = 2'-O-methylcytidine-3'-phosphate
  modified_base 21: mod_base = OTHER; note = 2'-O-methyluridine-3'-phosphate N-[tris(GalNAc-alkyl)-amidodecanoyl)]-4-hydroxyprolinol (Hyp-(GalNAc-alkyl)3)
agacatgagctgtgagggtct

SEQ ID NO: 7078 - RNA, 21 nt, synthetic construct
  source 1..21: mol_type = other RNA
  modified_base 1: mod_base = OTHER; note = 2'-O-methyladenosine-3'-phosphorothioate
  modified_base 2: mod_base = OTHER; note = 2'-O-methyluridine-3'-phosphorothioate
  modified_base 3: mod_base = OTHER; note = 2'-O-methylguanosine-3'-phosphate
  modified_base 4: mod_base = OTHER; note = 2'-O-methyladenosine-3'-phosphate
  modified_base 5: mod_base = OTHER; note = 2'-O-methylguanosine-3'-phosphate
  modified_base 6: mod_base = OTHER; note = 2'-O-methylcytidine-3'-phosphate
  modified_base 7: mod_base = OTHER; note = 2'-fluorouridine-3'-phosphate
  modified_base 8: mod_base = OTHER; note = 2'-O-methylguanosine-3'-phosphate
  modified_base 9: mod_base = OTHER; note = 2'-fluorouridine-3'-phosphate
  modified_base 10: mod_base = OTHER; note = 2'-fluoroguanosine-3'-phosphate
  modified_base 11: mod_base = OTHER; note = 2'-fluoroadenosine-3'-phosphate
  modified_base 12: mod_base = OTHER; note = 2'-O-methylguanosine-3'-phosphate
  modified_base 13: mod_base = OTHER; note = 2'-O-methylguanosine-3'-phosphate
  modified_base 14: mod_base = OTHER; note = 2'-O-methylguanosine-3'-phosphate
  modified_base 15: mod_base = OTHER; note = 2'-O-methyluridine-3'-phosphate
  modified_base 16: mod_base = OTHER; note = 2'-O-methylcytidine-3'-phosphate
  modified_base 17: mod_base = OTHER; note = 2'-O-methyladenosine-3'-phosphate
  modified_base 18: mod_base = OTHER; note = 2'-O-methyladenosine-3'-phosphate
  modified_base 19: mod_base = OTHER; note = 2'-O-methylguanosine-3'-phosphate
  modified_base 20: mod_base = OTHER; note = 2'-O-methylcytidine-3'-phosphate
  modified_base 21: mod_base = OTHER; note = 2'-O-methyluridine-3'-phosphate N-[tris(GalNAc-alkyl)-amidodecanoyl)]-4-hydroxyprolinol (Hyp-(GalNAc-alkyl)3)
atgagctgtgagggtcaagct

SEQ ID NO: 7079 - RNA, 21 nt, synthetic construct
  source 1..21: mol_type = other RNA
  modified_base 1: mod_base = OTHER; note = 2'-O-methylguanosine-3'-phosphorothioate
  modified_base 2: mod_base = OTHER; note = 2'-O-methyladenosine-3'-phosphorothioate
  modified_base 3: mod_base = OTHER; note = 2'-O-methylguanosine-3'-phosphate
  modified_base 4: mod_base = OTHER; note = 2'-O-methylcytidine-3'-phosphate
  modified_base 5: mod_base = OTHER; note = 2'-O-methyluridine-3'-phosphate
  modified_base 6: mod_base = OTHER; note = 2'-O-methylguanosine-3'-phosphate
  modified_base 7: mod_base = OTHER; note = 2'-fluorouridine-3'-phosphate
  modified_base 8: mod_base = OTHER; note = 2'-O-methylguanosine-3'-phosphate
  modified_base 9: mod_base = OTHER; note = 2'-fluoroadenosine-3'-phosphate
  modified_base 10: mod_base = OTHER; note = 2'-fluoroguanosine-3'-phosphate
  modified_base 11: mod_base = OTHER; note = 2'-fluoroguanosine-3'-phosphate
  modified_base 12: mod_base = OTHER; note = 2'-O-methylguanosine-3'-phosphate
  modified_base 13: mod_base = OTHER; note = 2'-O-methyluridine-3'-phosphate
  modified_base 14: mod_base = OTHER; note = 2'-O-methylcytidine-3'-phosphate
  modified_base 15: mod_base = OTHER; note = 2'-O-methyladenosine-3'-phosphate
  modified_base 16: mod_base = OTHER; note = 2'-O-methyladenosine-3'-phosphate
  modified_base 17: mod_base = OTHER; note = 2'-O-methylguanosine-3'-phosphate
  modified_base 18: mod_base = OTHER; note = 2'-O-methylcytidine-3'-phosphate
  modified_base 19: mod_base = OTHER; note = 2'-O-methyladenosine-3'-phosphate
  modified_base 20: mod_base = OTHER; note = 2'-O-methylcytidine-3'-phosphate
  modified_base 21: mod_base = OTHER; note = 2'-O-methyluridine-3'-phosphate N-[tris(GalNAc-alkyl)-amidodecanoyl)]-4-hydroxyprolinol (Hyp-(GalNAc-alkyl)3)
gagctgtgagggtcaagcact

SEQ ID NO: 7080 - RNA, 21 nt, synthetic construct
  source 1..21: mol_type = other RNA
  modified_base 1: mod_base = OTHER; note = 2'-O-methyladenosine-3'-phosphorothioate
  modified_base 2: mod_base = OTHER; note = 2'-O-methylguanosine-3'-phosphorothioate
  modified_base 3: mod_base = OTHER; note = 2'-O-methylcytidine-3'-phosphate
  modified_base 4: mod_base = OTHER; note = 2'-O-methyluridine-3'-phosphate
  modified_base 5: mod_base = OTHER; note = 2'-O-methylguanosine-3'-phosphate
  modified_base 6: mod_base = OTHER; note = 2'-O-methyluridine-3'-phosphate
  modified_base 7: mod_base = OTHER; note = 2'-fluoroguanosine-3'-phosphate
  modified_base 8: mod_base = OTHER; note = 2'-O-methyladenosine-3'-phosphate
  modified_base 9: mod_base = OTHER; note = 2'-fluoroguanosine-3'-phosphate
  modified_base 10: mod_base = OTHER; note = 2'-fluoroguanosine-3'-phosphate
  modified_base 11: mod_base = OTHER; note = 2'-fluoroguanosine-3'-phosphate
  modified_base 12: mod_base = OTHER; note = 2'-O-methyluridine-3'-phosphate
  modified_base 13: mod_base = OTHER; note = 2'-O-methylcytidine-3'-phosphate
  modified_base 14: mod_base = OTHER; note = 2'-O-methyladenosine-3'-phosphate
  modified_base 15: mod_base = OTHER; note = 2'-O-methyladenosine-3'-phosphate
  modified_base 16: mod_base = OTHER; note = 2'-O-methylguanosine-3'-phosphate
  modified_base 17: mod_base = OTHER; note = 2'-O-methylcytidine-3'-phosphate
  modified_base 18: mod_base = OTHER; note = 2'-O-methyladenosine-3'-phosphate
  modified_base 19: mod_base = OTHER; note = 2'-O-methylcytidine-3'-phosphate
  modified_base 20: mod_base = OTHER; note = 2'-O-methyladenosine-3'-phosphate
  modified_base 21: mod_base = OTHER; note = 2'-O-methyluridine-3'-phosphate N-[tris(GalNAc-alkyl)-amidodecanoyl)]-4-hydroxyprolinol (Hyp-(GalNAc-alkyl)3)
agctgtgagggtcaagcacat

SEQ ID NO: 7081 - RNA, 21 nt, synthetic construct
  source 1..21: mol_type = other RNA
  modified_base 1: mod_base = OTHER; note = 2'-O-methyluridine-3'-phosphorothioate
  modified_base 2: mod_base = OTHER; note = 2'-O-methylguanosine-3'-phosphorothioate
  modified_base 3: mod_base = OTHER; note = 2'-O-methyluridine-3'-phosphate
  modified_base 4: mod_base = OTHER; note = 2'-O-methylguanosine-3'-phosphate
  modified_base 5: mod_base = OTHER; note = 2'-O-methyladenosine-3'-phosphate
  modified_base 6: mod_base = OTHER; note = 2'-O-methylguanosine-3'-phosphate
  modified_base 7: mod_base = OTHER; note = 2'-fluoroguanosine-3'-phosphate
  modified_base 8: mod_base = OTHER; note = 2'-O-methylguanosine-3'-phosphate
  modified_base 9: mod_base = OTHER; note = 2'-fluorouridine-3'-phosphate
  modified_base 10: mod_base = OTHER; note = 2'-fluorocytidine-3'-phosphate
  modified_base 11: mod_base = OTHER; note = 2'-fluoroadenosine-3'-phosphate
  modified_base 12: mod_base = OTHER; note = 2'-O-methyladenosine-3'-phosphate
  modified_base 13: mod_base = OTHER; note = 2'-O-methylguanosine-3'-phosphate
  modified_base 14: mod_base = OTHER; note = 2'-O-methylcytidine-3'-phosphate
  modified_base 15: mod_base = OTHER; note = 2'-O-methyladenosine-3'-phosphate
  modified_base 16: mod_base = OTHER; note = 2'-O-methylcytidine-3'-phosphate
  modified_base 17: mod_base = OTHER; note = 2'-O-methyladenosine-3'-phosphate
  modified_base 18: mod_base = OTHER; note = 2'-O-methylguanosine-3'-phosphate
  modified_base 19: mod_base = OTHER; note = 2'-O-methylcytidine-3'-phosphate
  modified_base 20: mod_base = OTHER; note = 2'-O-methyluridine-3'-phosphate
  modified_base 21: mod_base = OTHER; note = 2'-O-methyluridine-3'-phosphate N-[tris(GalNAc-alkyl)-amidodecanoyl)]-4-hydroxyprolinol (Hyp-(GalNAc-alkyl)3)
tgtgagggtcaagcacagctt

SEQ ID NO: 7082 - RNA, 21 nt, synthetic construct
  source 1..21: mol_type = other RNA
  modified_base 1: mod_base = OTHER; note = 2'-O-methyluridine-3'-phosphorothioate
  modified_base 2: mod_base = OTHER; note = 2'-O-methylguanosine-3'-phosphorothioate
  modified_base 3: mod_base = OTHER; note = 2'-O-methyladenosine-3'-phosphate
  modified_base 4: mod_base = OTHER; note = 2'-O-methylguanosine-3'-phosphate
  modified_base 5: mod_base = OTHER; note = 2'-O-methylguanosine-3'-phosphate
  modified_base 6: mod_base = OTHER; note = 2'-O-methylguanosine-3'-phosphate
  modified_base 7: mod_base = OTHER; note = 2'-fluorouridine-3'-phosphate
  modified_base 8: mod_base = OTHER; note = 2'-O-methylcytidine-3'-phosphate
  modified_base 9: mod_base = OTHER; note = 2'-fluoroadenosine-3'-phosphate
  modified_base 10: mod_base = OTHER; note = 2'-fluoroadenosine-3'-phosphate
  modified_base 11: mod_base = OTHER; note = 2'-fluoroguanosine-3'-phosphate
  modified_base 12: mod_base = OTHER; note = 2'-O-methylcytidine-3'-phosphate
  modified_base 13: mod_base = OTHER; note = 2'-O-methyladenosine-3'-phosphate
  modified_base 14: mod_base = OTHER; note = 2'-O-methylcytidine-3'-phosphate
  modified_base 15: mod_base = OTHER; note = 2'-O-methyladenosine-3'-phosphate
  modified_base 16: mod_base = OTHER; note = 2'-O-methylguanosine-3'-phosphate
  modified_base 17: mod_base = OTHER; note = 2'-O-methylcytidine-3'-phosphate
  modified_base 18: mod_base = OTHER; note = 2'-O-methyluridine-3'-phosphate
  modified_base 19: mod_base = OTHER; note = 2'-O-methyladenosine-3'-phosphate
  modified_base 20: mod_base = OTHER; note = 2'-O-methyluridine-3'-phosphate
  modified_base 21: mod_base = OTHER; note = 2'-O-methyluridine-3'-phosphate N-[tris(GalNAc-alkyl)-amidodecanoyl)]-4-hydroxyprolinol (Hyp-(GalNAc-alkyl)3)
tgagggtcaagcacagctatt

SEQ ID NO: 7083 - RNA, 21 nt, synthetic construct
  source 1..21: mol_type = other RNA
  modified_base 1: mod_base = OTHER; note = 2'-O-methylguanosine-3'-phosphorothioate
  modified_base 2: mod_base = OTHER; note = 2'-O-methylguanosine-3'-phosphorothioate
  modified_base 3: mod_base = OTHER; note = 2'-O-methylguanosine-3'-phosphate
  modified_base 4: mod_base = OTHER; note = 2'-O-methyluridine-3'-phosphate
  modified_base 5: mod_base = OTHER; note = 2'-O-methylcytidine-3'-phosphate
  modified_base 6: mod_base = OTHER; note = 2'-O-methyladenosine-3'-phosphate
  modified_base 7: mod_base = OTHER; note = 2'-fluoroadenosine-3'-phosphate
  modified_base 8: mod_base = OTHER; note = 2'-O-methylguanosine-3'-phosphate
  modified_base 9: mod_base = OTHER; note = 2'-fluorocytidine-3'-phosphate
  modified_base 10: mod_base = OTHER; note = 2'-fluoroadenosine-3'-phosphate
  modified_base 11: mod_base = OTHER; note = 2'-fluorocytidine-3'-phosphate
  modified_base 12: mod_base = OTHER; note = 2'-O-methyladenosine-3'-phosphate
  modified_base 13: mod_base = OTHER; note = 2'-O-methylguanosine-3'-phosphate
  modified_base 14: mod_base = OTHER; note = 2'-O-methylcytidine-3'-phosphate
  modified_base 15: mod_base = OTHER; note = 2'-O-methyluridine-3'-phosphate
  modified_base 16: mod_base = OTHER; note = 2'-O-methyladenosine-3'-phosphate
  modified_base 17: mod_base = OTHER; note = 2'-O-methyluridine-3'-phosphate
  modified_base 18: mod_base = OTHER; note = 2'-O-methylcytidine-3'-phosphate
  modified_base 19: mod_base = OTHER; note = 2'-O-methylcytidine-3'-phosphate
  modified_base 20: mod_base = OTHER; note = 2'-O-methyladenosine-3'-phosphate
  modified_base 21: mod_base = OTHER; note = 2'-O-methyluridine-3'-phosphate N-[tris(GalNAc-alkyl)-amidodecanoyl)]-4-hydroxyprolinol (Hyp-(GalNAc-alkyl)3)
gggtcaagcacagctatccat

SEQ ID NO: 7084 - RNA, 21 nt, synthetic construct
  source 1..21: mol_type = other RNA
  modified_base 1: mod_base = OTHER; note = 2'-O-methyladenosine-3'-phosphorothioate
  modified_base 2: mod_base = OTHER; note = 2'-O-methyladenosine-3'-phosphorothioate
  modified_base 3: mod_base = OTHER; note = 2'-O-methylguanosine-3'-phosphate
  modified_base 4: mod_base = OTHER; note = 2'-O-methylcytidine-3'-phosphate
  modified_base 5: mod_base = OTHER; note = 2'-O-methyladenosine-3'-phosphate
  modified_base 6: mod_base = OTHER; note = 2'-O-methylcytidine-3'-phosphate
  modified_base 7: mod_base = OTHER; note = 2'-fluoroadenosine-3'-phosphate
  modified_base 8: mod_base = OTHER; note = 2'-O-methylguanosine-3'-phosphate
  modified_base 9: mod_base = OTHER; note = 2'-fluorocytidine-3'-phosphate
  modified_base 10: mod_base = OTHER; note = 2'-fluorouridine-3'-phosphate
  modified_base 11: mod_base = OTHER; note = 2'-fluoroadenosine-3'-phosphate
  modified_base 12: mod_base = OTHER; note = 2'-O-methyluridine-3'-phosphate
  modified_base 13: mod_base = OTHER; note = 2'-O-methylcytidine-3'-phosphate
  modified_base 14: mod_base = OTHER; note = 2'-O-methylcytidine-3'-phosphate
  modified_base 15: mod_base = OTHER; note = 2'-O-methyladenosine-3'-phosphate
  modified_base 16: mod_base = OTHER; note = 2'-O-methyluridine-3'-phosphate
  modified_base 17: mod_base = OTHER; note = 2'-O-methylcytidine-3'-phosphate
  modified_base 18: mod_base = OTHER; note = 2'-O-methyladenosine-3'-phosphate
  modified_base 19: mod_base = OTHER; note = 2'-O-methylguanosine-3'-phosphate
  modified_base 20: mod_base = OTHER; note = 2'-O-methyladenosine-3'-phosphate
  modified_base 21: mod_base = OTHER; note = 2'-O-methyluridine-3'-phosphate N-[tris(GalNAc-alkyl)-amidodecanoyl)]-4-hydroxyprolinol (Hyp-(GalNAc-alkyl)3)
aagcacagctatccatcagat

SEQ ID NO: 7085 - RNA, 21 nt, synthetic construct
  source 1..21: mol_type = other RNA
  modified_base 1: mod_base = OTHER; note = 2'-O-methylcytidine-3'-phosphorothioate
  modified_base 2: mod_base = OTHER; note = 2'-O-methyladenosine-3'-phosphorothioate
  modified_base 3: mod_base = OTHER; note = 2'-O-methylcytidine-3'-phosphate
  modified_base 4: mod_base = OTHER; note = 2'-O-methyladenosine-3'-phosphate
  modified_base 5: mod_base = OTHER; note = 2'-O-methylguanosine-3'-phosphate
  modified_base 6: mod_base = OTHER; note = 2'-O-methylcytidine-3'-phosphate
  modified_base 7: mod_base = OTHER; note = 2'-fluorouridine-3'-phosphate
  modified_base 8: mod_base = OTHER; note = 2'-O-methyladenosine-3'-phosphate
  modified_base 9: mod_base = OTHER; note = 2'-fluorouridine-3'-phosphate
  modified_base 10: mod_base = OTHER; note = 2'-fluorocytidine-3'-phosphate
  modified_base 11: mod_base = OTHER; note = 2'-fluorocytidine-3'-phosphate
  modified_base 12: mod_base = OTHER; note = 2'-O-methyladenosine-3'-phosphate
  modified_base 13: mod_base = OTHER; note = 2'-O-methyluridine-3'-phosphate
  modified_base 14: mod_base = OTHER; note = 2'-O-methylcytidine-3'-phosphate
  modified_base 15: mod_base = OTHER; note = 2'-O-methyladenosine-3'-phosphate
  modified_base 16: mod_base = OTHER; note = 2'-O-methylguanosine-3'-phosphate
  modified_base 17: mod_base = OTHER; note = 2'-O-methyladenosine-3'-phosphate
  modified_base 18: mod_base = OTHER; note = 2'-O-methyluridine-3'-phosphate
  modified_base 19: mod_base = OTHER; note = 2'-O-methylguanosine-3'-phosphate
  modified_base 20: mod_base = OTHER; note = 2'-O-methyladenosine-3'-phosphate
  modified_base 21: mod_base = OTHER; note = 2'-O-methyluridine-3'-phosphate N-[tris(GalNAc-alkyl)-amidodecanoyl)]-4-hydroxyprolinol (Hyp-(GalNAc-alkyl)3)
cacagctatccatcagatgat

SEQ ID NO: 7086 - RNA, 21 nt, synthetic construct
  source 1..21: mol_type = other RNA
  modified_base 1: mod_base = OTHER; note = 2'-O-methylcytidine-3'-phosphorothioate
  modified_base 2: mod_base = OTHER; note = 2'-O-methyladenosine-3'-phosphorothioate
  modified_base 3: mod_base = OTHER; note = 2'-O-methylguanosine-3'-phosphate
  modified_base 4: mod_base = OTHER; note = 2'-O-methylcytidine-3'-phosphate
  modified_base 5: mod_base = OTHER; note = 2'-O-methyluridine-3'-phosphate
  modified_base 6: mod_base = OTHER; note = 2'-O-methyladenosine-3'-phosphate
  modified_base 7: mod_base = OTHER; note = 2'-fluorouridine-3'-phosphate
  modified_base 8: mod_base = OTHER; note = 2'-O-methylcytidine-3'-phosphate
  modified_base 9: mod_base = OTHER; note = 2'-fluorocytidine-3'-phosphate
  modified_base 10: mod_base = OTHER; note = 2'-fluoroadenosine-3'-phosphate
  modified_base 11: mod_base = OTHER; note = 2'-fluorouridine-3'-phosphate
  modified_base 12: mod_base = OTHER; note = 2'-O-methylcytidine-3'-phosphate
  modified_base 13: mod_base = OTHER; note = 2'-O-methyladenosine-3'-phosphate
  modified_base 14: mod_base = OTHER; note = 2'-O-methylguanosine-3'-phosphate
  modified_base 15: mod_base = OTHER; note = 2'-O-methyladenosine-3'-phosphate
  modified_base 16: mod_base = OTHER; note = 2'-O-methyluridine-3'-phosphate
  modified_base 17: mod_base = OTHER; note = 2'-O-methylguanosine-3'-phosphate
  modified_base 18: mod_base = OTHER; note = 2'-O-methyladenosine-3'-phosphate
  modified_base 19: mod_base = OTHER; note = 2'-O-methyluridine-3'-phosphate
  modified_base 20: mod_base = OTHER; note = 2'-O-methylcytidine-3'-phosphate
  modified_base 21: mod_base = OTHER; note = 2'-O-methyluridine-3'-phosphate N-[tris(GalNAc-alkyl)-amidodecanoyl)]-4-hydroxyprolinol (Hyp-(GalNAc-alkyl)3)
cagctatccatcagatgatct

SEQ ID NO: 7087 - RNA, 21 nt, synthetic construct
  source 1..21: mol_type = other RNA
  modified_base 1: mod_base = OTHER; note = 2'-O-methyladenosine-3'-phosphorothioate
  modified_base 2: mod_base = OTHER; note = 2'-O-methylguanosine-3'-phosphorothioate
  modified_base 3: mod_base = OTHER; note = 2'-O-methylcytidine-3'-phosphate
  modified_base 4: mod_base = OTHER; note = 2'-O-methyluridine-3'-phosphate
  modified_base 5: mod_base = OTHER; note = 2'-O-methyladenosine-3'-phosphate
  modified_base 6: mod_base = OTHER; note = 2'-O-methyluridine-3'-phosphate
  modified_base 7: mod_base = OTHER; note = 2'-fluorocytidine-3'-phosphate
  modified_base 8: mod_base = OTHER; note = 2'-O-methylcytidine-3'-phosphate
  modified_base 9: mod_base = OTHER; note = 2'-fluoroadenosine-3'-phosphate
  modified_base 10: mod_base = OTHER; note = 2'-fluorouridine-3'-phosphate
  modified_base 11: mod_base = OTHER; note = 2'-fluorocytidine-3'-phosphate
  modified_base 12: mod_base = OTHER; note = 2'-O-methyladenosine-3'-phosphate
  modified_base 13: mod_base = OTHER; note = 2'-O-methylguanosine-3'-phosphate
  modified_base 14: mod_base = OTHER; note = 2'-O-methyladenosine-3'-phosphate
  modified_base 15: mod_base = OTHER; note = 2'-O-methyluridine-3'-phosphate
  modified_base 16: mod_base = OTHER; note = 2'-O-methylguanosine-3'-phosphate
  modified_base 17: mod_base = OTHER; note = 2'-O-methyladenosine-3'-phosphate
  modified_base 18: mod_base = OTHER; note = 2'-O-methyluridine-3'-phosphate
  modified_base 19: mod_base = OTHER; note = 2'-O-methylcytidine-3'-phosphate
  modified_base 20: mod_base = OTHER; note = 2'-O-methyluridine-3'-phosphate
  modified_base 21: mod_base = OTHER; note = 2'-O-methyluridine-3'-phosphate N-[tris(GalNAc-alkyl)-amidodecanoyl)]-4-hydroxyprolinol (Hyp-(GalNAc-alkyl)3)
agctatccatcagatgatctt

SEQ ID NO: 7088 - RNA, 21 nt, synthetic construct
  source 1..21: mol_type = other RNA
  modified_base 1: mod_base = OTHER; note = 2'-O-methylcytidine-3'-phosphorothioate
  modified_base 2: mod_base = OTHER; note = 2'-O-methyluridine-3'-phosphorothioate
  modified_base 3: mod_base = OTHER; note = 2'-O-methyladenosine-3'-phosphate
  modified_base 4: mod_base = OTHER; note = 2'-O-methyluridine-3'-phosphate
  modified_base 5: mod_base = OTHER; note = 2'-O-methylcytidine-3'-phosphate
  modified_base 6: mod_base = OTHER; note = 2'-O-methylcytidine-3'-phosphate
  modified_base 7: mod_base = OTHER; note = 2'-fluoroadenosine-3'-phosphate
  modified_base 8: mod_base = OTHER; note = 2'-O-methyluridine-3'-phosphate
  modified_base 9: mod_base = OTHER; note = 2'-fluorocytidine-3'-phosphate
  modified_base 10: mod_base = OTHER; note = 2'-fluoroadenosine-3'-phosphate
  modified_base 11: mod_base = OTHER; note = 2'-fluoroguanosine-3'-phosphate
  modified_base 12: mod_base = OTHER; note = 2'-O-methyladenosine-3'-phosphate
  modified_base 13: mod_base = OTHER; note = 2'-O-methyluridine-3'-phosphate
  modified_base 14: mod_base = OTHER; note = 2'-O-methylguanosine-3'-phosphate
  modified_base 15: mod_base = OTHER; note = 2'-O-methyladenosine-3'-phosphate
  modified_base 16: mod_base = OTHER; note = 2'-O-methyluridine-3'-phosphate
  modified_base 17: mod_base = OTHER; note = 2'-O-methylcytidine-3'-phosphate
  modified_base 18: mod_base = OTHER; note = 2'-O-methyluridine-3'-phosphate
  modified_base 19: mod_base = OTHER; note = 2'-O-methyladenosine-3'-phosphate
  modified_base 20: mod_base = OTHER; note = 2'-O-methylcytidine-3'-phosphate
  modified_base 21: mod_base = OTHER; note = 2'-O-methyluridine-3'-phosphate N-[tris(GalNAc-alkyl)-amidodecanoyl)]-4-hydroxyprolinol (Hyp-(GalNAc-alkyl)3)
ctatccatcagatgatctact

SEQ ID NO: 7089 - RNA, 21 nt, synthetic construct
  source 1..21: mol_type = other RNA
  modified_base 1: mod_base = OTHER; note = 2'-O-methyluridine-3'-phosphorothioate
  modified_base 2: mod_base = OTHER; note = 2'-O-methyladenosine-3'-phosphorothioate
  modified_base 3: mod_base = OTHER; note = 2'-O-methyluridine-3'-phosphate
  modified_base 4: mod_base = OTHER; note = 2'-O-methylcytidine-3'-phosphate
  modified_base 5: mod_base = OTHER; note = 2'-O-methylcytidine-3'-phosphate
  modified_base 6: mod_base = OTHER; note = 2'-O-methyladenosine-3'-phosphate
  modified_base 7: mod_base = OTHER; note = 2'-fluorouridine-3'-phosphate
  modified_base 8: mod_base = OTHER; note = 2'-O-methylcytidine-3'-phosphate
  modified_base 9: mod_base = OTHER; note = 2'-fluoroadenosine-3'-phosphate
  modified_base 10: mod_base = OTHER; note = 2'-fluoroguanosine-3'-phosphate
  modified_base 11: mod_base = OTHER; note = 2'-fluoroadenosine-3'-phosphate
  modified_base 12: mod_base = OTHER; note = 2'-O-methyluridine-3'-phosphate
  modified_base 13: mod_base = OTHER; note = 2'-O-methylguanosine-3'-phosphate
  modified_base 14: mod_base = OTHER; note = 2'-O-methyladenosine-3'-phosphate
  modified_base 15: mod_base = OTHER; note = 2'-O-methyluridine-3'-phosphate
  modified_base 16: mod_base = OTHER; note = 2'-O-methylcytidine-3'-phosphate
  modified_base 17: mod_base = OTHER; note = 2'-O-methyluridine-3'-phosphate
  modified_base 18: mod_base = OTHER; note = 2'-O-methyladenosine-3'-phosphate
  modified_base 19: mod_base = OTHER; note = 2'-O-methylcytidine-3'-phosphate
  modified_base 20: mod_base = OTHER; note = 2'-O-methyluridine-3'-phosphate
  modified_base 21: mod_base = OTHER; note = 2'-O-methyluridine-3'-phosphate N-[tris(GalNAc-alkyl)-amidodecanoyl)]-4-hydroxyprolinol (Hyp-(GalNAc-alkyl)3)
tatccatcagatgatctactt

SEQ ID NO: 7090 - RNA, 21 nt, synthetic construct
  source 1..21: mol_type = other RNA
  modified_base 1: mod_base = OTHER; note = 2'-O-methyluridine-3'-phosphorothioate
  modified_base 2: mod_base = OTHER; note = 2'-O-methylcytidine-3'-phosphorothioate
  modified_base 3: mod_base = OTHER; note = 2'-O-methylcytidine-3'-phosphate
  modified_base 4: mod_base = OTHER; note = 2'-O-methyladenosine-3'-phosphate
  modified_base 5: mod_base = OTHER; note = 2'-O-methyluridine-3'-phosphate
  modified_base 6: mod_base = OTHER; note = 2'-O-methylcytidine-3'-phosphate
  modified_base 7: mod_base = OTHER; note = 2'-fluoroadenosine-3'-phosphate
  modified_base 8: mod_base = OTHER; note = 2'-O-methylguanosine-3'-phosphate
  modified_base 9: mod_base = OTHER; note = 2'-fluoroadenosine-3'-phosphate
  modified_base 10: mod_base = OTHER; note = 2'-fluorouridine-3'-phosphate
  modified_base 11: mod_base = OTHER; note = 2'-fluoroguanosine-3'-phosphate
  modified_base 12: mod_base = OTHER; note = 2'-O-methyladenosine-3'-phosphate
  modified_base 13: mod_base = OTHER; note = 2'-O-methyluridine-3'-phosphate
  modified_base 14: mod_base = OTHER; note = 2'-O-methylcytidine-3'-phosphate
  modified_base 15: mod_base = OTHER; note = 2'-O-methyluridine-3'-phosphate
  modified_base 16: mod_base = OTHER; note = 2'-O-methyladenosine-3'-phosphate
  modified_base 17: mod_base = OTHER; note = 2'-O-methylcytidine-3'-phosphate
  modified_base 18: mod_base = OTHER; note = 2'-O-methyluridine-3'-phosphate
  modified_base 19: mod_base = OTHER; note = 2'-O-methyluridine-3'-phosphate
  modified_base 20: mod_base = OTHER; note = 2'-O-methyluridine-3'-phosphate
  modified_base 21: mod_base = OTHER; note = 2'-O-methyluridine-3'-phosphate N-[tris(GalNAc-alkyl)-amidodecanoyl)]-4-hydroxyprolinol (Hyp-(GalNAc-alkyl)3)
tccatcagatgatctactttt

SEQ ID NO: 7091 - RNA, 21 nt, synthetic construct
  source 1..21: mol_type = other RNA
  modified_base 1: mod_base = OTHER; note = 2'-O-methylcytidine-3'-phosphorothioate
  modified_base 2: mod_base = OTHER; note = 2'-O-methylcytidine-3'-phosphorothioate
  modified_base 3: mod_base = OTHER; note = 2'-O-methyladenosine-3'-phosphate
  modified_base 4: mod_base = OTHER; note = 2'-O-methyluridine-3'-phosphate
  modified_base 5: mod_base = OTHER; note = 2'-O-methylcytidine-3'-phosphate
  modified_base 6: mod_base = OTHER; note = 2'-O-methyladenosine-3'-phosphate
  modified_base 7: mod_base = OTHER; note = 2'-fluoroguanosine-3'-phosphate
  modified_base 8: mod_base = OTHER; note = 2'-O-methyladenosine-3'-phosphate
  modified_base 9: mod_base = OTHER; note = 2'-fluorouridine-3'-phosphate
  modified_base 10: mod_base = OTHER; note = 2'-fluoroguanosine-3'-phosphate
  modified_base 11: mod_base = OTHER; note = 2'-fluoroadenosine-3'-phosphate
  modified_base 12: mod_base = OTHER; note = 2'-O-methyluridine-3'-phosphate
  modified_base 13: mod_base = OTHER; note = 2'-O-methylcytidine-3'-phosphate
  modified_base 14: mod_base = OTHER; note = 2'-O-methyluridine-3'-phosphate
  modified_base 15: mod_base = OTHER; note = 2'-O-methyladenosine-3'-phosphate
  modified_base 16: mod_base = OTHER; note = 2'-O-methylcytidine-3'-phosphate
  modified_base 17: mod_base = OTHER; note = 2'-O-methyluridine-3'-phosphate
  modified_base 18: mod_base = OTHER; note = 2'-O-methyluridine-3'-phosphate
  modified_base 19: mod_base = OTHER; note = 2'-O-methyluridine-3'-phosphate
  modified_base 20: mod_base = OTHER; note = 2'-O-methylcytidine-3'-phosphate
  modified_base 21: mod_base = OTHER; note = 2'-O-methyluridine-3'-phosphate N-[tris(GalNAc-alkyl)-amidodecanoyl)]-4-hydroxyprolinol (Hyp-(GalNAc-alkyl)3)
ccatcagatgatctactttct

SEQ ID NO: 7092 - RNA, 21 nt, synthetic construct
  source 1..21: mol_type = other RNA
  modified_base 1: mod_base = OTHER; note = 2'-O-methylcytidine-3'-phosphorothioate
  modified_base 2: mod_base = OTHER; note = 2'-O-methyladenosine-3'-phosphorothioate
  modified_base 3: mod_base = OTHER; note = 2'-O-methylguanosine-3'-phosphate
  modified_base 4: mod_base = OTHER; note = 2'-O-methyladenosine-3'-phosphate
  modified_base 5: mod_base = OTHER; note = 2'-O-methyluridine-3'-phosphate
  modified_base 6: mod_base = OTHER; note = 2'-O-methylguanosine-3'-phosphate
  modified_base 7: mod_base = OTHER; note = 2'-fluoroadenosine-3'-phosphate
  modified_base 8: mod_base = OTHER; note = 2'-O-methyluridine-3'-phosphate
  modified_base 9: mod_base = OTHER; note = 2'-fluorocytidine-3'-phosphate
  modified_base 10: mod_base = OTHER; note = 2'-fluorouridine-3'-phosphate
  modified_base 11: mod_base = OTHER; note = 2'-fluoroadenosine-3'-phosphate
  modified_base 12: mod_base = OTHER; note = 2'-O-methylcytidine-3'-phosphate
  modified_base 13: mod_base = OTHER; note = 2'-O-methyluridine-3'-phosphate
  modified_base 14: mod_base = OTHER; note = 2'-O-methyluridine-3'-phosphate
  modified_base 15: mod_base = OTHER; note = 2'-O-methyluridine-3'-phosphate
  modified_base 16: mod_base = OTHER; note = 2'-O-methylcytidine-3'-phosphate
  modified_base 17: mod_base = OTHER; note = 2'-O-methyladenosine-3'-phosphate
  modified_base 18: mod_base = OTHER; note = 2'-O-methylguanosine-3'-phosphate
  modified_base 19: mod_base = OTHER; note = 2'-O-methylcytidine-3'-phosphate
  modified_base 20: mod_base = OTHER; note = 2'-O-methylcytidine-3'-phosphate
  modified_base 21: mod_base = OTHER; note = 2'-O-methyluridine-3'-phosphate N-[tris(GalNAc-alkyl)-amidodecanoyl)]-4-hydroxyprolinol (Hyp-(GalNAc-alkyl)3)
cagatgatctactttcagcct

SEQ ID NO: 7093 - RNA, 21 nt, synthetic construct
  source 1..21: mol_type = other RNA
  modified_base 1: mod_base = OTHER; note = 2'-O-methylguanosine-3'-phosphorothioate
  modified_base 2: mod_base = OTHER; note = 2'-O-methyladenosine-3'-phosphorothioate
  modified_base 3: mod_base = OTHER; note = 2'-O-methyluridine-3'-phosphate
  modified_base 4: mod_base = OTHER; note = 2'-O-methylguanosine-3'-phosphate
  modified_base 5: mod_base = OTHER; note = 2'-O-methyladenosine-3'-phosphate
  modified_base 6: mod_base = OTHER; note = 2'-O-methyluridine-3'-phosphate
  modified_base 7: mod_base = OTHER; note = 2'-fluorocytidine-3'-phosphate
  modified_base 8: mod_base = OTHER; note = 2'-O-methyluridine-3'-phosphate
  modified_base 9: mod_base = OTHER; note = 2'-fluoroadenosine-3'-phosphate
  modified_base 10: mod_base = OTHER; note = 2'-fluorocytidine-3'-phosphate
  modified_base 11: mod_base = OTHER; note = 2'-fluorouridine-3'-phosphate
  modified_base 12: mod_base = OTHER; note = 2'-O-methyluridine-3'-phosphate
  modified_base 13: mod_base = OTHER; note = 2'-O-methyluridine-3'-phosphate
  modified_base 14: mod_base = OTHER; note = 2'-O-methylcytidine-3'-phosphate
  modified_base 15: mod_base = OTHER; note = 2'-O-methyladenosine-3'-phosphate
  modified_base 16: mod_base = OTHER; note = 2'-O-methylguanosine-3'-phosphate
  modified_base 17: mod_base = OTHER; note = 2'-O-methylcytidine-3'-phosphate
  modified_base 18: mod_base = OTHER; note = 2'-O-methylcytidine-3'-phosphate
  modified_base 19: mod_base = OTHER; note = 2'-O-methyluridine-3'-phosphate
  modified_base 20: mod_base = OTHER; note = 2'-O-methyluridine-3'-phosphate
  modified_base 21: mod_base = OTHER; note = 2'-O-methyluridine-3'-phosphate N-[tris(GalNAc-alkyl)-amidodecanoyl)]-4-hydroxyprolinol (Hyp-(GalNAc-alkyl)3)
gatgatctactttcagccttt

SEQ ID NO: 7094 - RNA, 21 nt, synthetic construct
  source 1..21: mol_type = other RNA
  modified_base 1: mod_base = OTHER; note = 2'-O-methyluridine-3'-phosphorothioate
  modified_base 2: mod_base = OTHER; note = 2'-O-methylcytidine-3'-phosphorothioate
  modified_base 3: mod_base = OTHER; note = 2'-O-methyluridine-3'-phosphate
  modified_base 4: mod_base = OTHER; note = 2'-O-methyladenosine-3'-phosphate
  modified_base 5: mod_base = OTHER; note = 2'-O-methylcytidine-3'-phosphate
  modified_base 6: mod_base = OTHER; note = 2'-O-methyluridine-3'-phosphate
  modified_base 7: mod_base = OTHER; note = 2'-fluorouridine-3'-phosphate
  modified_base 8: mod_base = OTHER; note = 2'-O-methyluridine-3'-phosphate
  modified_base 9: mod_base = OTHER; note = 2'-fluorocytidine-3'-phosphate
  modified_base 10: mod_base = OTHER; note = 2'-fluoroadenosine-3'-phosphate
  modified_base 11: mod_base = OTHER; note = 2'-fluoroguanosine-3'-phosphate
  modified_base 12: mod_base = OTHER; note = 2'-O-methylcytidine-3'-phosphate
  modified_base 13: mod_base = OTHER; note = 2'-O-methylcytidine-3'-phosphate
  modified_base 14: mod_base = OTHER; note = 2'-O-methyluridine-3'-phosphate
  modified_base 15: mod_base = OTHER; note = 2'-O-methyluridine-3'-phosphate
  modified_base 16: mod_base = OTHER; note = 2'-O-methylcytidine-3'-phosphate
  modified_base 17: mod_base = OTHER; note = 2'-O-methylcytidine-3'-phosphate
  modified_base 18: mod_base = OTHER; note = 2'-O-methyluridine-3'-phosphate
  modified_base 19: mod_base = OTHER; note = 2'-O-methylguanosine-3'-phosphate
  modified_base 20: mod_base = OTHER; note = 2'-O-methyladenosine-3'-phosphate
  modified_base 21: mod_base = OTHER; note = 2'-O-methyluridine-3'-phosphate N-[tris(GalNAc-alkyl)-amidodecanoyl)]-4-hydroxyprolinol (Hyp-(GalNAc-alkyl)3)
tctactttcagccttcctgat

SEQ ID NO: 7095 - RNA, 21 nt, synthetic construct
  source 1..21: mol_type = other RNA
  modified_base 1: mod_base = OTHER; note = 2'-O-methyladenosine-3'-phosphorothioate
  modified_base 2: mod_base = OTHER; note = 2'-O-methylcytidine-3'-phosphorothioate
  modified_base 3: mod_base = OTHER; note = 2'-O-methyluridine-3'-phosphate
  modified_base 4: mod_base = OTHER; note = 2'-O-methyluridine-3'-phosphate
  modified_base 5: mod_base = OTHER; note = 2'-O-methyluridine-3'-phosphate
  modified_base 6: mod_base = OTHER; note = 2'-O-methylcytidine-3'-phosphate
  modified_base 7: mod_base = OTHER; note = 2'-fluoroadenosine-3'-phosphate
  modified_base 8: mod_base = OTHER; note = 2'-O-methylguanosine-3'-phosphate
  modified_base 9: mod_base = OTHER; note = 2'-fluorocytidine-3'-phosphate
  modified_base 10: mod_base = OTHER; note = 2'-fluorocytidine-3'-phosphate
  modified_base 11: mod_base = OTHER; note = 2'-fluorouridine-3'-phosphate
  modified_base 12: mod_base = OTHER; note = 2'-O-methyluridine-3'-phosphate
  modified_base 13: mod_base = OTHER; note = 2'-O-methylcytidine-3'-phosphate
  modified_base 14: mod_base = OTHER; note = 2'-O-methylcytidine-3'-phosphate
  modified_base 15: mod_base = OTHER; note = 2'-O-methyluridine-3'-phosphate
  modified_base 16: mod_base = OTHER; note = 2'-O-methylguanosine-3'-phosphate
  modified_base 17: mod_base = OTHER; note = 2'-O-methyladenosine-3'-phosphate
  modified_base 18: mod_base = OTHER; note = 2'-O-methylguanosine-3'-phosphate
  modified_base 19: mod_base = OTHER; note = 2'-O-methyluridine-3'-phosphate
  modified_base 20: mod_base = OTHER; note = 2'-O-methylcytidine-3'-phosphate
  modified_base 21: mod_base = OTHER; note = 2'-O-methyluridine-3'-phosphate N-[tris(GalNAc-alkyl)-amidodecanoyl)]-4-hydroxyprolinol (Hyp-(GalNAc-alkyl)3)
actttcagccttcctgagtct

SEQ ID NO: 7096 - RNA, 21 nt, synthetic construct
  source 1..21: mol_type = other RNA
  modified_base 1: mod_base = OTHER; note = 2'-O-methyluridine-3'-phosphorothioate
  modified_base 2: mod_base = OTHER; note = 2'-O-methylcytidine-3'-phosphorothioate
  modified_base 3: mod_base = OTHER; note = 2'-O-methyladenosine-3'-phosphate
  modified_base 4: mod_base = OTHER; note = 2'-O-methylguanosine-3'-phosphate
  modified_base 5: mod_base = OTHER; note = 2'-O-methylcytidine-3'-phosphate
  modified_base 6: mod_base = OTHER; note = 2'-O-methylcytidine-3'-phosphate
  modified_base 7: mod_base = OTHER; note = 2'-fluorouridine-3'-phosphate
  modified_base 8: mod_base = OTHER; note = 2'-O-methyluridine-3'-phosphate
  modified_base 9: mod_base = OTHER; note = 2'-fluorocytidine-3'-phosphate
  modified_base 10: mod_base = OTHER; note = 2'-fluorocytidine-3'-phosphate
  modified_base 11: mod_base = OTHER; note = 2'-fluorouridine-3'-phosphate
  modified_base 12: mod_base = OTHER; note = 2'-O-methylguanosine-3'-phosphate
  modified_base 13: mod_base = OTHER; note = 2'-O-methyladenosine-3'-phosphate
  modified_base 14: mod_base = OTHER; note = 2'-O-methylguanosine-3'-phosphate
  modified_base 15: mod_base = OTHER; note = 2'-O-methyluridine-3'-phosphate
  modified_base 16: mod_base = OTHER; note = 2'-O-methylcytidine-3'-phosphate
  modified_base 17: mod_base = OTHER; note = 2'-O-methylcytidine-3'-phosphate
  modified_base 18: mod_base = OTHER; note = 2'-O-methylcytidine-3'-phosphate
  modified_base 19: mod_base = OTHER; note = 2'-O-methyladenosine-3'-phosphate
  modified_base 20: mod_base = OTHER; note = 2'-O-methylguanosine-3'-phosphate
  modified_base 21: mod_base = OTHER; note = 2'-O-methyluridine-3'-phosphate N-[tris(GalNAc-alkyl)-amidodecanoyl)]-4-hydroxyprolinol (Hyp-(GalNAc-alkyl)3)
tcagccttcctgagtcccagt

SEQ ID NO: 7097 - RNA, 21 nt, synthetic construct
  source 1..21: mol_type = other RNA
  modified_base 1: mod_base = OTHER; note = 2'-O-methylguanosine-3'-phosphorothioate
  modified_base 2: mod_base = OTHER; note = 2'-O-methylcytidine-3'-phosphorothioate
  modified_base 3: mod_base = OTHER; note = 2'-O-methyladenosine-3'-phosphate
  modified_base 4: mod_base = OTHER; note = 2'-O-methylguanosine-3'-phosphate
  modified_base 5: mod_base = OTHER; note = 2'-O-methyluridine-3'-phosphate
  modified_base 6: mod_base = OTHER; note = 2'-O-methylguanosine-3'-phosphate
  modified_base 7: mod_base = OTHER; note = 2'-fluoroguanosine-3'-phosphate
  modified_base 8: mod_base = OTHER; note = 2'-O-methyluridine-3'-phosphate
  modified_base 9: mod_base = OTHER; note = 2'-fluoroguanosine-3'-phosphate
  modified_base 10: mod_base = OTHER; note = 2'-fluorouridine-3'-phosphate
  modified_base 11: mod_base = OTHER; note = 2'-fluorocytidine-3'-phosphate
  modified_base 12: mod_base = OTHER; note = 2'-O-methyluridine-3'-phosphate
  modified_base 13: mod_base = OTHER; note = 2'-O-methylguanosine-3'-phosphate
  modified_base 14: mod_base = OTHER; note = 2'-O-methylcytidine-3'-phosphate
  modified_base 15: mod_base = OTHER; note = 2'-O-methyluridine-3'-phosphate
  modified_base 16: mod_base = OTHER; note = 2'-O-methylguanosine-3'-phosphate
  modified_base 17: mod_base = OTHER; note = 2'-O-methyluridine-3'-phosphate
  modified_base 18: mod_base = OTHER; note = 2'-O-methylcytidine-3'-phosphate
  modified_base 19: mod_base = OTHER; note = 2'-O-methyladenosine-3'-phosphate
  modified_base 20: mod_base = OTHER; note = 2'-O-methylcytidine-3'-phosphate
  modified_base 21: mod_base = OTHER; note = 2'-O-methyluridine-3'-phosphate N-[tris(GalNAc-alkyl)-amidodecanoyl)]-4-hydroxyprolinol (Hyp-(GalNAc-alkyl)3)
gcagtggtgtctgctgtcact

SEQ ID NO: 7098 - RNA, 21 nt, synthetic construct
  source 1..21: mol_type = other RNA
  modified_base 1: mod_base = OTHER; note = 2'-O-methyladenosine-3'-phosphorothioate
  modified_base 2: mod_base = OTHER; note = 2'-O-methylguanosine-3'-phosphorothioate
  modified_base 3: mod_base = OTHER; note = 2'-O-methyluridine-3'-phosphate
  modified_base 4: mod_base = OTHER; note = 2'-O-methylguanosine-3'-phosphate
  modified_base 5: mod_base = OTHER; note = 2'-O-methylguanosine-3'-phosphate
  modified_base 6: mod_base = OTHER; note = 2'-O-methyluridine-3'-phosphate
  modified_base 7: mod_base = OTHER; note = 2'-fluoroguanosine-3'-phosphate
  modified_base 8: mod_base = OTHER; note = 2'-O-methyluridine-3'-phosphate
  modified_base 9: mod_base = OTHER; note = 2'-fluorocytidine-3'-phosphate
  modified_base 10: mod_base = OTHER; note = 2'-fluorouridine-3'-phosphate
  modified_base 11: mod_base = OTHER; note = 2'-fluoroguanosine-3'-phosphate
  modified_base 12: mod_base = OTHER; note = 2'-O-methylcytidine-3'-phosphate
  modified_base 13: mod_base = OTHER; note = 2'-O-methyluridine-3'-phosphate
  modified_base 14: mod_base = OTHER; note = 2'-O-methylguanosine-3'-phosphate
  modified_base 15: mod_base = OTHER; note = 2'-O-methyluridine-3'-phosphate
  modified_base 16: mod_base = OTHER; note = 2'-O-methylcytidine-3'-phosphate
  modified_base 17: mod_base = OTHER; note = 2'-O-methyladenosine-3'-phosphate
  modified_base 18: mod_base = OTHER; note = 2'-O-methylcytidine-3'-phosphate
  modified_base 19: mod_base = OTHER; note = 2'-O-methyluridine-3'-phosphate
  modified_base 20: mod_base = OTHER; note = 2'-O-methylguanosine-3'-phosphate
  modified_base 21: mod_base = OTHER; note = 2'-O-methyluridine-3'-phosphate N-[tris(GalNAc-alkyl)-amidodecanoyl)]-4-hydroxyprolinol (Hyp-(GalNAc-alkyl)3)
agtggtgtctgctgtcactgt

SEQ ID NO: 7099 - RNA, 21 nt, synthetic construct
  source 1..21: mol_type = other RNA
  modified_base 1: mod_base = OTHER; note = 2'-O-methyluridine-3'-phosphorothioate
  modified_base 2: mod_base = OTHER; note = 2'-O-methylguanosine-3'-phosphorothioate
  modified_base 3: mod_base = OTHER; note = 2'-O-methylguanosine-3'-phosphate
  modified_base 4: mod_base = OTHER; note = 2'-O-methyluridine-3'-phosphate
  modified_base 5: mod_base = OTHER; note = 2'-O-methylguanosine-3'-phosphate
  modified_base 6: mod_base = OTHER; note = 2'-O-methyluridine-3'-phosphate
  modified_base 7: mod_base = OTHER; note = 2'-fluorocytidine-3'-phosphate
  modified_base 8: mod_base = OTHER; note = 2'-O-methyluridine-3'-phosphate
  modified_base 9: mod_base = OTHER; note = 2'-fluoroguanosine-3'-phosphate
  modified_base 10: mod_base = OTHER; note = 2'-fluorocytidine-3'-phosphate
  modified_base 11: mod_base = OTHER; note = 2'-fluorouridine-3'-phosphate
  modified_base 12: mod_base = OTHER; note = 2'-O-methylguanosine-3'-phosphate
  modified_base 13: mod_base = OTHER; note = 2'-O-methyluridine-3'-phosphate
  modified_base 14: mod_base = OTHER; note = 2'-O-methylcytidine-3'-phosphate
  modified_base 15: mod_base = OTHER; note = 2'-O-methyladenosine-3'-phosphate
  modified_base 16: mod_base = OTHER; note = 2'-O-methylcytidine-3'-phosphate
  modified_base 17: mod_base = OTHER; note = 2'-O-methyluridine-3'-phosphate
  modified_base 18: mod_base = OTHER; note = 2'-O-methylguanosine-3'-phosphate
  modified_base 19: mod_base = OTHER; note = 2'-O-methyluridine-3'-phosphate
  modified_base 20: mod_base = OTHER; note = 2'-O-methylguanosine-3'-phosphate
  modified_base 21: mod_base = OTHER; note = 2'-O-methyluridine-3'-phosphate N-[tris(GalNAc-alkyl)-amidodecanoyl)]-4-hydroxyprolinol (Hyp-(GalNAc-alkyl)3)
tggtgtctgctgtcactgtgt

SEQ ID NO: 7100 - RNA, 21 nt, synthetic construct
  source 1..21: mol_type = other RNA
  modified_base 1: mod_base = OTHER; note = 2'-O-methylguanosine-3'-phosphorothioate
  modified_base 2: mod_base = OTHER; note = 2'-O-methyladenosine-3'-phosphorothioate
  modified_base 3: mod_base = OTHER; note = 2'-O-methylcytidine-3'-phosphate
  modified_base 4: mod_base = OTHER; note = 2'-O-methyluridine-3'-phosphate
  modified_base 5: mod_base = OTHER; note = 2'-O-methylcytidine-3'-phosphate
  modified_base 6: mod_base = OTHER; note = 2'-O-methyladenosine-3'-phosphate
  modified_base 7: mod_base = OTHER; note = 2'-fluoroadenosine-3'-phosphate
  modified_base 8: mod_base = OTHER; note = 2'-O-methylcytidine-3'-phosphate
  modified_base 9: mod_base = OTHER; note = 2'-fluoroadenosine-3'-phosphate
  modified_base 10: mod_base = OTHER; note = 2'-fluoroguanosine-3'-phosphate
  modified_base 11: mod_base = OTHER; note = 2'-fluoroadenosine-3'-phosphate
  modified_base 12: mod_base = OTHER; note = 2'-O-methylcytidine-3'-phosphate
  modified_base 13: mod_base = OTHER; note = 2'-O-methylguanosine-3'-phosphate
  modified_base 14: mod_base = OTHER; note = 2'-O-methylguanosine-3'-phosphate
  modified_base 15: mod_base = OTHER; note = 2'-O-methyladenosine-3'-phosphate
  modified_base 16: mod_base = OTHER; note = 2'-O-methylguanosine-3'-phosphate
  modified_base 17: mod_base = OTHER; note = 2'-O-methylcytidine-3'-phosphate
  modified_base 18: mod_base = OTHER; note = 2'-O-methyladenosine-3'-phosphate
  modified_base 19: mod_base = OTHER; note = 2'-O-methyladenosine-3'-phosphate
  modified_base 20: mod_base = OTHER; note = 2'-O-methylcytidine-3'-phosphate
  modified_base 21: mod_base = OTHER; note = 2'-O-methyluridine-3'-phosphate N-[tris(GalNAc-alkyl)-amidodecanoyl)]-4-hydroxyprolinol (Hyp-(GalNAc-alkyl)3)
gactcaacagacggagcaact

SEQ ID NO: 7101 - RNA, 21 nt, synthetic construct
  source 1..21: mol_type = other RNA
  modified_base 1: mod_base = OTHER; note = 2'-O-methyluridine-3'-phosphorothioate
  modified_base 2: mod_base = OTHER; note = 2'-O-methylcytidine-3'-phosphorothioate
  modified_base 3: mod_base = OTHER; note = 2'-O-methyladenosine-3'-phosphate
  modified_base 4: mod_base = OTHER; note = 2'-O-methyladenosine-3'-phosphate
  modified_base 5: mod_base = OTHER; note = 2'-O-methylcytidine-3'-phosphate
  modified_base 6: mod_base = OTHER; note = 2'-O-methyladenosine-3'-phosphate
  modified_base 7: mod_base = OTHER; note = 2'-fluoroguanosine-3'-phosphate
  modified_base 8: mod_base = OTHER; note = 2'-O-methyladenosine-3'-phosphate
  modified_base 9: mod_base = OTHER; note = 2'-fluorocytidine-3'-phosphate
  modified_base 10: mod_base = OTHER; note = 2'-fluoroguanosine-3'-phosphate
  modified_base 11: mod_base = OTHER; note = 2'-fluoroguanosine-3'-phosphate
  modified_base 12: mod_base = OTHER; note = 2'-O-methyladenosine-3'-phosphate
  modified_base 13: mod_base = OTHER; note = 2'-O-methylguanosine-3'-phosphate
  modified_base 14: mod_base = OTHER; note = 2'-O-methylcytidine-3'-phosphate
  modified_base 15: mod_base = OTHER; note = 2'-O-methyladenosine-3'-phosphate
  modified_base 16: mod_base = OTHER; note = 2'-O-methyladenosine-3'-phosphate
  modified_base 17: mod_base = OTHER; note = 2'-O-methylcytidine-3'-phosphate
  modified_base 18: mod_base = OTHER; note = 2'-O-methyluridine-3'-phosphate
  modified_base 19: mod_base = OTHER; note = 2'-O-methylguanosine-3'-phosphate
  modified_base 20: mod_base = OTHER; note = 2'-O-methylcytidine-3'-phosphate
  modified_base 21: mod_base = OTHER; note = 2'-O-methyluridine-3'-phosphate N-[tris(GalNAc-alkyl)-amidodecanoyl)]-4-hydroxyprolinol (Hyp-(GalNAc-alkyl)3)
tcaacagacggagcaactgct

SEQ ID NO: 7102 - RNA, 21 nt, synthetic construct
  source 1..21: mol_type = other RNA
  modified_base 1: mod_base = OTHER; note = 2'-O-methylcytidine-3'-phosphorothioate
  modified_base 2: mod_base = OTHER; note = 2'-O-methyladenosine-3'-phosphorothioate
  modified_base 3: mod_base = OTHER; note = 2'-O-methyladenosine-3'-phosphate
  modified_base 4: mod_base = OTHER; note = 2'-O-methylcytidine-3'-phosphate
  modified_base 5: mod_base = OTHER; note = 2'-O-methyladenosine-3'-phosphate
  modified_base 6: mod_base = OTHER; note = 2'-O-methylguanosine-3'-phosphate
  modified_base 7: mod_base = OTHER; note = 2'-fluoroadenosine-3'-phosphate
  modified_base 8: mod_base = OTHER; note = 2'-O-methylcytidine-3'-phosphate
  modified_base 9: mod_base = OTHER; note = 2'-fluoroguanosine-3'-phosphate
  modified_base 10: mod_base = OTHER; note = 2'-fluoroguanosine-3'-phosphate
  modified_base 11: mod_base = OTHER; note = 2'-fluoroadenosine-3'-phosphate
  modified_base 12: mod_base = OTHER; note = 2'-O-methylguanosine-3'-phosphate
  modified_base 13: mod_base = OTHER; note = 2'-O-methylcytidine-3'-phosphate
  modified_base 14: mod_base = OTHER; note = 2'-O-methyladenosine-3'-phosphate
  modified_base 15: mod_base = OTHER; note = 2'-O-methyladenosine-3'-phosphate
  modified_base 16: mod_base = OTHER; note = 2'-O-methylcytidine-3'-phosphate
  modified_base 17: mod_base = OTHER; note = 2'-O-methyluridine-3'-phosphate
  modified_base 18: mod_base = OTHER; note = 2'-O-methylguanosine-3'-phosphate
  modified_base 19: mod_base = OTHER; note = 2'-O-methylcytidine-3'-phosphate
  modified_base 20: mod_base = OTHER; note = 2'-O-methylcytidine-3'-phosphate
  modified_base 21: mod_base = OTHER; note = 2'-O-methyluridine-3'-phosphate N-[tris(GalNAc-alkyl)-amidodecanoyl)]-4-hydroxyprolinol (Hyp-(GalNAc-alkyl)3)
caacagacggagcaactgcct

SEQ ID NO: 7103 - RNA, 21 nt, synthetic construct
  source 1..21: mol_type = other RNA
  modified_base 1: mod_base = OTHER; note = 2'-O-methyladenosine-3'-phosphorothioate
  modified_base 2: mod_base = OTHER; note = 2'-O-methylcytidine-3'-phosphorothioate
  modified_base 3: mod_base = OTHER; note = 2'-O-methyladenosine-3'-phosphate
  modified_base 4: mod_base = OTHER; note = 2'-O-methylguanosine-3'-phosphate
  modified_base 5: mod_base = OTHER; note = 2'-O-methyladenosine-3'-phosphate
  modified_base 6: mod_base = OTHER; note = 2'-O-methylcytidine-3'-phosphate
  modified_base 7: mod_base = OTHER; note = 2'-fluoroguanosine-3'-phosphate
  modified_base 8: mod_base = OTHER; note = 2'-O-methylguanosine-3'-phosphate
  modified_base 9: mod_base = OTHER; note = 2'-fluoroadenosine-3'-phosphate
  modified_base 10: mod_base = OTHER; note = 2'-fluoroguanosine-3'-phosphate
  modified_base 11: mod_base = OTHER; note = 2'-fluorocytidine-3'-phosphate
  modified_base 12: mod_base = OTHER; note = 2'-O-methyladenosine-3'-phosphate
  modified_base 13: mod_base = OTHER; note = 2'-O-methyladenosine-3'-phosphate
  modified_base 14: mod_base = OTHER; note = 2'-O-methylcytidine-3'-phosphate
  modified_base 15: mod_base = OTHER; note = 2'-O-methyluridine-3'-phosphate
  modified_base 16: mod_base = OTHER; note = 2'-O-methylguanosine-3'-phosphate
  modified_base 17: mod_base = OTHER; note = 2'-O-methylcytidine-3'-phosphate
  modified_base 18: mod_base = OTHER; note = 2'-O-methylcytidine-3'-phosphate
  modified_base 19: mod_base = OTHER; note = 2'-O-methyladenosine-3'-phosphate
  modified_base 20: mod_base = OTHER; note = 2'-O-methyluridine-3'-phosphate
  modified_base 21: mod_base = OTHER; note = 2'-O-methyluridine-3'-phosphate N-[tris(GalNAc-alkyl)-amidodecanoyl)]-4-hydroxyprolinol (Hyp-(GalNAc-alkyl)3)
acagacggagcaactgccatt

SEQ ID NO: 7104 - RNA, 21 nt, synthetic construct
  source 1..21: mol_type = other RNA
  modified_base 1: mod_base = OTHER; note = 2'-O-methylguanosine-3'-phosphorothioate
  modified_base 2: mod_base = OTHER; note = 2'-O-methylcytidine-3'-phosphorothioate
  modified_base 3: mod_base = OTHER; note = 2'-O-methyladenosine-3'-phosphate
  modified_base 4: mod_base = OTHER; note = 2'-O-methyladenosine-3'-phosphate
  modified_base 5: mod_base = OTHER; note = 2'-O-methylcytidine-3'-phosphate
  modified_base 6: mod_base = OTHER; note = 2'-O-methyluridine-3'-phosphate
  modified_base 7: mod_base = OTHER; note = 2'-fluoroguanosine-3'-phosphate
  modified_base 8: mod_base = OTHER; note = 2'-O-methylcytidine-3'-phosphate
  modified_base 9: mod_base = OTHER; note = 2'-fluorocytidine-3'-phosphate
  modified_base 10: mod_base = OTHER; note = 2'-fluoroadenosine-3'-phosphate
  modified_base 11: mod_base = OTHER; note = 2'-fluorouridine-3'-phosphate
  modified_base 12: mod_base = OTHER; note = 2'-O-methylcytidine-3'-phosphate
  modified_base 13: mod_base = OTHER; note = 2'-O-methylcytidine-3'-phosphate
  modified_base 14: mod_base = OTHER; note = 2'-O-methylguanosine-3'-phosphate
  modified_base 15: mod_base = OTHER; note = 2'-O-methyladenosine-3'-phosphate
  modified_base 16: mod_base = OTHER; note = 2'-O-methylguanosine-3'-phosphate
  modified_base 17: mod_base = OTHER; note = 2'-O-methylguanosine-3'-phosphate
  modified_base 18: mod_base = OTHER; note = 2'-O-methylcytidine-3'-phosphate
  modified_base 19: mod_base = OTHER; note = 2'-O-methyluridine-3'-phosphate
  modified_base 20: mod_base = OTHER; note = 2'-O-methylcytidine-3'-phosphate
  modified_base 21: mod_base = OTHER; note = 2'-O-methyluridine-3'-phosphate N-[tris(GalNAc-alkyl)-amidodecanoyl)]-4-hydroxyprolinol (Hyp-(GalNAc-alkyl)3)
gcaactgccatccgaggctct

SEQ ID NO: 7105 - RNA, 21 nt, synthetic construct
  source 1..21: mol_type = other RNA
  modified_base 1: mod_base = OTHER; note = 2'-O-methyladenosine-3'-phosphorothioate
  modified_base 2: mod_base = OTHER; note = 2'-O-methylguanosine-3'-phosphorothioate
  modified_base 3: mod_base = OTHER; note = 2'-O-methylcytidine-3'-phosphate
  modified_base 4: mod_base = OTHER; note = 2'-O-methyladenosine-3'-phosphate
  modified_base 5: mod_base = OTHER; note = 2'-O-methylguanosine-3'-phosphate
  modified_base 6: mod_base = OTHER; note = 2'-O-methyladenosine-3'-phosphate
  modified_base 7: mod_base = OTHER; note = 2'-fluoroadenosine-3'-phosphate
  modified_base 8: mod_base = OTHER; note = 2'-O-methylcytidine-3'-phosphate
  modified_base 9: mod_base = OTHER; note = 2'-fluoroguanosine-3'-phosphate
  modified_base 10: mod_base = OTHER; note = 2'-fluoroadenosine-3'-phosphate
  modified_base 11: mod_base = OTHER; note = 2'-fluoroguanosine-3'-phosphate
  modified_base 12: mod_base = OTHER; note = 2'-O-methylcytidine-3'-phosphate
  modified_base 13: mod_base = OTHER; note = 2'-O-methyluridine-3'-phosphate
  modified_base 14: mod_base = OTHER; note = 2'-O-methylcytidine-3'-phosphate
  modified_base 15: mod_base = OTHER; note = 2'-O-methyluridine-3'-phosphate
  modified_base 16: mod_base = OTHER; note = 2'-O-methylguanosine-3'-phosphate
  modified_base 17: mod_base = OTHER; note = 2'-O-methylguanosine-3'-phosphate
  modified_base 18: mod_base = OTHER; note = 2'-O-methyluridine-3'-phosphate
  modified_base 19: mod_base = OTHER; note = 2'-O-methylguanosine-3'-phosphate
  modified_base 20: mod_base = OTHER; note = 2'-O-methylcytidine-3'-phosphate
  modified_base 21: mod_base = OTHER; note = 2'-O-methyluridine-3'-phosphate N-[tris(GalNAc-alkyl)-amidodecanoyl)]-4-hydroxyprolinol (Hyp-(GalNAc-alkyl)3)
agcagaacgagctctggtgct

SEQ ID NO: 7106 - RNA, 21 nt, synthetic construct
  source 1..21: mol_type = other RNA
  modified_base 1: mod_base = OTHER; note = 2'-O-methyladenosine-3'-phosphorothioate
  modified_base 2: mod_base = OTHER; note = 2'-O-methylguanosine-3'-phosphorothioate
  modified_base 3: mod_base = OTHER; note = 2'-O-methyladenosine-3'-phosphate
  modified_base 4: mod_base = OTHER; note = 2'-O-methyladenosine-3'-phosphate
  modified_base 5: mod_base = OTHER; note = 2'-O-methylcytidine-3'-phosphate
  modified_base 6: mod_base = OTHER; note = 2'-O-methylguanosine-3'-phosphate
  modified_base 7: mod_base = OTHER; note = 2'-fluoroadenosine-3'-phosphate
  modified_base 8: mod_base = OTHER; note = 2'-O-methylguanosine-3'-phosphate
  modified_base 9: mod_base = OTHER; note = 2'-fluorocytidine-3'-phosphate
  modified_base 10: mod_base = OTHER; note = 2'-fluorouridine-3'-phosphate
  modified_base 11: mod_base = OTHER; note = 2'-fluorocytidine-3'-phosphate
  modified_base 12: mod_base = OTHER; note = 2'-O-methyluridine-3'-phosphate
  modified_base 13: mod_base = OTHER; note = 2'-O-methylguanosine-3'-phosphate
  modified_base 14: mod_base = OTHER; note = 2'-O-methylguanosine-3'-phosphate
  modified_base 15: mod_base = OTHER; note = 2'-O-methyluridine-3'-phosphate
  modified_base 16: mod_base = OTHER; note = 2'-O-methylguanosine-3'-phosphate
  modified_base 17: mod_base = OTHER; note = 2'-O-methylcytidine-3'-phosphate
  modified_base 18: mod_base = OTHER; note = 2'-O-methyluridine-3'-phosphate
  modified_base 19: mod_base = OTHER; note = 2'-O-methylguanosine-3'-phosphate
  modified_base 20: mod_base = OTHER; note = 2'-O-methylguanosine-3'-phosphate
  modified_base 21: mod_base = OTHER; note = 2'-O-methyluridine-3'-phosphate N-[tris(GalNAc-alkyl)-amidodecanoyl)]-4-hydroxyprolinol (Hyp-(GalNAc-alkyl)3)
agaacgagctctggtgctggt

SEQ ID NO: 7107 - RNA, 21 nt, synthetic construct
  source 1..21: mol_type = other RNA
  modified_base 1: mod_base = OTHER; note = 2'-O-methyladenosine-3'-phosphorothioate
  modified_base 2: mod_base = OTHER; note = 2'-O-methylcytidine-3'-phosphorothioate
  modified_base 3: mod_base = OTHER; note = 2'-O-methylguanosine-3'-phosphate
  modified_base 4: mod_base = OTHER; note = 2'-O-methyladenosine-3'-phosphate
  modified_base 5: mod_base = OTHER; note = 2'-O-methylguanosine-3'-phosphate
  modified_base 6: mod_base = OTHER; note = 2'-O-methylcytidine-3'-phosphate
  modified_base 7: mod_base = OTHER; note = 2'-fluorouridine-3'-phosphate
  modified_base 8: mod_base = OTHER; note = 2'-O-methylcytidine-3'-phosphate
  modified_base 9: mod_base = OTHER; note = 2'-fluorouridine-3'-phosphate
  modified_base 10: mod_base = OTHER; note = 2'-fluoroguanosine-3'-phosphate
  modified_base 11: mod_base = OTHER; note = 2'-fluoroguanosine-3'-phosphate
  modified_base 12: mod_base = OTHER; note = 2'-O-methyluridine-3'-phosphate
  modified_base 13: mod_base = OTHER; note = 2'-O-methylguanosine-3'-phosphate
  modified_base 14: mod_base = OTHER; note = 2'-O-methylcytidine-3'-phosphate
  modified_base 15: mod_base = OTHER; note = 2'-O-methyluridine-3'-phosphate
  modified_base 16: mod_base = OTHER; note = 2'-O-methylguanosine-3'-phosphate
  modified_base 17: mod_base = OTHER; note = 2'-O-methylguanosine-3'-phosphate
  modified_base 18: mod_base = OTHER; note = 2'-O-methyladenosine-3'-phosphate
  modified_base 19: mod_base = OTHER; note = 2'-O-methylguanosine-3'-phosphate
  modified_base 20: mod_base = OTHER; note = 2'-O-methylcytidine-3'-phosphate
  modified_base 21: mod_base = OTHER; note = 2'-O-methyluridine-3'-phosphate N-[tris(GalNAc-alkyl)-amidodecanoyl)]-4-hydroxyprolinol (Hyp-(GalNAc-alkyl)3)
acgagctctggtgctggagct

SEQ ID NO: 7108 - RNA, 21 nt, synthetic construct
  source 1..21: mol_type = other RNA
  modified_base 1: mod_base = OTHER; note = 2'-O-methyluridine-3'-phosphorothioate
  modified_base 2: mod_base = OTHER; note = 2'-O-methylcytidine-3'-phosphorothioate
  modified_base 3: mod_base = OTHER; note = 2'-O-methyluridine-3'-phosphate
  modified_base 4: mod_base = OTHER; note = 2'-O-methylguanosine-3'-phosphate
  modified_base 5: mod_base = OTHER; note = 2'-O-methylguanosine-3'-phosphate
  modified_base 6: mod_base = OTHER; note = 2'-O-methyluridine-3'-phosphate
  modified_base 7: mod_base = OTHER; note = 2'-fluoroguanosine-3'-phosphate
  modified_base 8: mod_base = OTHER; note = 2'-O-methylcytidine-3'-phosphate
  modified_base 9: mod_base = OTHER; note = 2'-fluorouridine-3'-phosphate
  modified_base 10: mod_base = OTHER; note = 2'-fluoroguanosine-3'-phosphate
  modified_base 11: mod_base = OTHER; note = 2'-fluoroguanosine-3'-phosphate
  modified_base 12: mod_base = OTHER; note = 2'-O-methyladenosine-3'-phosphate
  modified_base 13: mod_base = OTHER; note = 2'-O-methylguanosine-3'-phosphate
  modified_base 14: mod_base = OTHER; note = 2'-O-methylcytidine-3'-phosphate
  modified_base 15: mod_base = OTHER; note = 2'-O-methyluridine-3'-phosphate
  modified_base 16: mod_base = OTHER; note = 2'-O-methyladenosine-3'-phosphate
  modified_base 17: mod_base = OTHER; note = 2'-O-methylguanosine-3'-phosphate
  modified_base 18: mod_base = OTHER; note = 2'-O-methylcytidine-3'-phosphate
  modified_base 19: mod_base = OTHER; note = 2'-O-methylcytidine-3'-phosphate
  modified_base 20: mod_base = OTHER; note = 2'-O-methyladenosine-3'-phosphate
  modified_base 21: mod_base = OTHER; note = 2'-O-methyluridine-3'-phosphate N-[tris(GalNAc-alkyl)-amidodecanoyl)]-4-hydroxyprolinol (Hyp-(GalNAc-alkyl)3)
tctggtgctggagctagccat

SEQ ID NO: 7109 - RNA, 21 nt, synthetic construct
  source 1..21: mol_type = other RNA
  modified_base 1: mod_base = OTHER; note = 2'-O-methyluridine-3'-phosphorothioate
  modified_base 2: mod_base = OTHER; note = 2'-O-methylguanosine-3'-phosphorothioate
  modified_base 3: mod_base = OTHER; note = 2'-O-methylcytidine-3'-phosphate
  modified_base 4: mod_base = OTHER; note = 2'-O-methyluridine-3'-phosphate
  modified_base 5: mod_base = OTHER; note = 2'-O-methylguanosine-3'-phosphate
  modified_base 6: mod_base = OTHER; note = 2'-O-methylguanosine-3'-phosphate
  modified_base 7: mod_base = OTHER; note = 2'-fluoroadenosine-3'-phosphate
  modified_base 8: mod_base = OTHER; note = 2'-O-methylguanosine-3'-phosphate
  modified_base 9: mod_base = OTHER; note = 2'-fluorocytidine-3'-phosphate
  modified_base 10: mod_base = OTHER; note = 2'-fluorouridine-3'-phosphate
  modified_base 11: mod_base = OTHER; note = 2'-fluoroadenosine-3'-phosphate
  modified_base 12: mod_base = OTHER; note = 2'-O-methylguanosine-3'-phosphate
  modified_base 13: mod_base = OTHER; note = 2'-O-methylcytidine-3'-phosphate
  modified_base 14: mod_base = OTHER; note = 2'-O-methylcytidine-3'-phosphate
  modified_base 15: mod_base = OTHER; note = 2'-O-methyladenosine-3'-phosphate
  modified_base 16: mod_base = OTHER; note = 2'-O-methyladenosine-3'-phosphate
  modified_base 17: mod_base = OTHER; note = 2'-O-methylguanosine-3'-phosphate
  modified_base 18: mod_base = OTHER; note = 2'-O-methylcytidine-3'-phosphate
  modified_base 19: mod_base = OTHER; note = 2'-O-methyladenosine-3'-phosphate
  modified_base 20: mod_base = OTHER; note = 2'-O-methylguanosine-3'-phosphate
  modified_base 21: mod_base = OTHER; note = 2'-O-methyluridine-3'-phosphate N-[tris(GalNAc-alkyl)-amidodecanoyl)]-4-hydroxyprolinol (Hyp-(GalNAc-alkyl)3)
tgctggagctagccaagcagt

SEQ ID NO: 7110 - RNA, 21 nt, synthetic construct
  source 1..21: mol_type = other RNA
  modified_base 1: mod_base = OTHER; note = 2'-O-methylguanosine-3'-phosphorothioate
  modified_base 2: mod_base = OTHER; note = 2'-O-methylguanosine-3'-phosphorothioate
  modified_base 3: mod_base = OTHER; note = 2'-O-methyladenosine-3'-phosphate
  modified_base 4: mod_base = OTHER; note = 2'-O-methylguanosine-3'-phosphate
  modified_base 5: mod_base = OTHER; note = 2'-O-methylcytidine-3'-phosphate
  modified_base 6: mod_base = OTHER; note = 2'-O-methyluridine-3'-phosphate
  modified_base 7: mod_base = OTHER; note = 2'-fluoroadenosine-3'-phosphate
  modified_base 8: mod_base = OTHER; note = 2'-O-methylguanosine-3'-phosphate
  modified_base 9: mod_base = OTHER; note = 2'-fluorocytidine-3'-phosphate
  modified_base 10: mod_base = OTHER; note = 2'-fluorocytidine-3'-phosphate
  modified_base 11: mod_base = OTHER; note = 2'-fluoroadenosine-3'-phosphate
  modified_base 12: mod_base = OTHER; note = 2'-O-methyladenosine-3'-phosphate
  modified_base 13: mod_base = OTHER; note = 2'-O-methylguanosine-3'-phosphate
  modified_base 14: mod_base = OTHER; note = 2'-O-methylcytidine-3'-phosphate
  modified_base 15: mod_base = OTHER; note = 2'-O-methyladenosine-3'-phosphate
  modified_base 16: mod_base = OTHER; note = 2'-O-methylguanosine-3'-phosphate
  modified_base 17: mod_base = OTHER; note = 2'-O-methylcytidine-3'-phosphate
  modified_base 18: mod_base = OTHER; note = 2'-O-methyladenosine-3'-phosphate
  modified_base 19: mod_base = OTHER; note = 2'-O-methyladenosine-3'-phosphate
  modified_base 20: mod_base = OTHER; note = 2'-O-methyladenosine-3'-phosphate
  modified_base 21: mod_base = OTHER; note = 2'-O-methyluridine-3'-phosphate N-[tris(GalNAc-alkyl)-amidodecanoyl)]-4-hydroxyprolinol (Hyp-(GalNAc-alkyl)3)
ggagctagccaagcagcaaat

SEQ ID NO: 7111 - RNA, 21 nt, synthetic construct
  source 1..21: mol_type = other RNA
  modified_base 1: mod_base = OTHER; note = 2'-O-methylguanosine-3'-phosphorothioate
  modified_base 2: mod_base = OTHER; note = 2'-O-methylcytidine-3'-phosphorothioate
  modified_base 3: mod_base = OTHER; note = 2'-O-methyluridine-3'-phosphate
  modified_base 4: mod_base = OTHER; note = 2'-O-methyladenosine-3'-phosphate
  modified_base 5: mod_base = OTHER; note = 2'-O-methylguanosine-3'-phosphate
  modified_base 6: mod_base = OTHER; note = 2'-O-methylcytidine-3'-phosphate
  modified_base 7: mod_base = OTHER; note = 2'-fluorocytidine-3'-phosphate
  modified_base 8: mod_base = OTHER; note = 2'-O-methyladenosine-3'-phosphate
  modified_base 9: mod_base = OTHER; note = 2'-fluoroadenosine-3'-phosphate
  modified_base 10: mod_base = OTHER; note = 2'-fluoroguanosine-3'-phosphate
  modified_base 11: mod_base = OTHER; note = 2'-fluorocytidine-3'-phosphate
  modified_base 12: mod_base = OTHER; note = 2'-O-methyladenosine-3'-phosphate
  modified_base 13: mod_base = OTHER; note = 2'-O-methylguanosine-3'-phosphate
  modified_base 14: mod_base = OTHER; note = 2'-O-methylcytidine-3'-phosphate
  modified_base 15: mod_base = OTHER; note = 2'-O-methyladenosine-3'-phosphate
  modified_base 16: mod_base = OTHER; note = 2'-O-methyladenosine-3'-phosphate
  modified_base 17: mod_base = OTHER; note = 2'-O-methyladenosine-3'-phosphate
  modified_base 18: mod_base = OTHER; note = 2'-O-methyluridine-3'-phosphate
  modified_base 19: mod_base = OTHER; note = 2'-O-methylcytidine-3'-phosphate
  modified_base 20: mod_base = OTHER; note = 2'-O-methylcytidine-3'-phosphate
  modified_base 21: mod_base = OTHER; note = 2'-O-methyluridine-3'-phosphate N-[tris(GalNAc-alkyl)-amidodecanoyl)]-4-hydroxyprolinol (Hyp-(GalNAc-alkyl)3)
gctagccaagcagcaaatcct

SEQ ID NO: 7112 - RNA, 21 nt, synthetic construct
  source 1..21: mol_type = other RNA
  modified_base 1: mod_base = OTHER; note = 2'-O-methyluridine-3'-phosphorothioate
  modified_base 2: mod_base = OTHER; note = 2'-O-methylguanosine-3'-phosphorothioate
  modified_base 3: mod_base = OTHER; note = 2'-O-methyladenosine-3'-phosphate
  modified_base 4: mod_base = OTHER; note = 2'-O-methylcytidine-3'-phosphate
  modified_base 5: mod_base = OTHER; note = 2'-O-methylcytidine-3'-phosphate
  modified_base 6: mod_base = OTHER; note = 2'-O-methyladenosine-3'-phosphate
  modified_base 7: mod_base = OTHER; note = 2'-fluoroguanosine-3'-phosphate
  modified_base 8: mod_base = OTHER; note = 2'-O-methyluridine-3'-phosphate
  modified_base 9: mod_base = OTHER; note = 2'-fluorocytidine-3'-phosphate
  modified_base 10: mod_base = OTHER; note = 2'-fluoroguanosine-3'-phosphate
  modified_base 11: mod_base = OTHER; note = 2'-fluorouridine-3'-phosphate
  modified_base 12: mod_base = OTHER; note = 2'-O-methylcytidine-3'-phosphate
  modified_base 13: mod_base = OTHER; note = 2'-O-methylcytidine-3'-phosphate
  modified_base 14: mod_base = OTHER; note = 2'-O-methylcytidine-3'-phosphate
  modified_base 15: mod_base = OTHER; note = 2'-O-methyladenosine-3'-phosphate
  modified_base 16: mod_base = OTHER; note = 2'-O-methylguanosine-3'-phosphate
  modified_base 17: mod_base = OTHER; note = 2'-O-methyladenosine-3'-phosphate
  modified_base 18: mod_base = OTHER; note = 2'-O-methyladenosine-3'-phosphate
  modified_base 19: mod_base = OTHER; note = 2'-O-methyluridine-3'-phosphate
  modified_base 20: mod_base = OTHER; note = 2'-O-methyladenosine-3'-phosphate
  modified_base 21: mod_base = OTHER; note = 2'-O-methyluridine-3'-phosphate N-[tris(GalNAc-alkyl)-amidodecanoyl)]-4-hydroxyprolinol (Hyp-(GalNAc-alkyl)3)
tgaccagtcgtcccagaatat

SEQ ID NO: 7113 - RNA, 21 nt, synthetic construct
  source 1..21: mol_type = other RNA
  modified_base 1: mod_base = OTHER; note = 2'-O-methyladenosine-3'-phosphorothioate
  modified_base 2: mod_base = OTHER; note = 2'-O-methylcytidine-3'-phosphorothioate
  modified_base 3: mod_base = OTHER; note = 2'-O-methylcytidine-3'-phosphate
  modified_base 4: mod_base = OTHER; note = 2'-O-methyladenosine-3'-phosphate
  modified_base 5: mod_base = OTHER; note = 2'-O-methylguanosine-3'-phosphate
  modified_base 6: mod_base = OTHER; note = 2'-O-methyluridine-3'-phosphate
  modified_base 7: mod_base = OTHER; note = 2'-fluorocytidine-3'-phosphate
  modified_base 8: mod_base = OTHER; note = 2'-O-methylguanosine-3'-phosphate
  modified_base 9: mod_base = OTHER; note = 2'-fluorouridine-3'-phosphate
  modified_base 10: mod_base = OTHER; note = 2'-fluorocytidine-3'-phosphate
  modified_base 11: mod_base = OTHER; note = 2'-fluorocytidine-3'-phosphate
  modified_base 12: mod_base = OTHER; note = 2'-O-methylcytidine-3'-phosphate
  modified_base 13: mod_base = OTHER; note = 2'-O-methyladenosine-3'-phosphate
  modified_base 14: mod_base = OTHER; note = 2'-O-methylguanosine-3'-phosphate
  modified_base 15: mod_base = OTHER; note = 2'-O-methyladenosine-3'-phosphate
  modified_base 16: mod_base = OTHER; note = 2'-O-methyladenosine-3'-phosphate
  modified_base 17: mod_base = OTHER; note = 2'-O-methyluridine-3'-phosphate
  modified_base 18: mod_base = OTHER; note = 2'-O-methyladenosine-3'-phosphate
  modified_base 19: mod_base = OTHER; note = 2'-O-methyladenosine-3'-phosphate
  modified_base 20: mod_base = OTHER; note = 2'-O-methylcytidine-3'-phosphate
  modified_base 21: mod_base = OTHER; note = 2'-O-methyluridine-3'-phosphate N-[tris(GalNAc-alkyl)-amidodecanoyl)]-4-hydroxyprolinol (Hyp-(GalNAc-alkyl)3)
accagtcgtcccagaataact

SEQ ID NO: 7114 - RNA, 21 nt, synthetic construct
  source 1..21: mol_type = other RNA
  modified_base 1: mod_base = OTHER; note = 2'-O-methylcytidine-3'-phosphorothioate
  modified_base 2: mod_base = OTHER; note = 2'-O-methyladenosine-3'-phosphorothioate
  modified_base 3: mod_base = OTHER; note = 2'-O-methylguanosine-3'-phosphate
  modified_base 4: mod_base = OTHER; note = 2'-O-methyluridine-3'-phosphate
  modified_base 5: mod_base = OTHER; note = 2'-O-methylcytidine-3'-phosphate
  modified_base 6: mod_base = OTHER; note = 2'-O-methylguanosine-3'-phosphate
  modified_base 7: mod_base = OTHER; note = 2'-fluorouridine-3'-phosphate
  modified_base 8: mod_base = OTHER; note = 2'-O-methylcytidine-3'-phosphate
  modified_base 9: mod_base = OTHER; note = 2'-fluorocytidine-3'-phosphate
  modified_base 10: mod_base = OTHER; note = 2'-fluorocytidine-3'-phosphate
  modified_base 11: mod_base = OTHER; note = 2'-fluoroadenosine-3'-phosphate
  modified_base 12: mod_base = OTHER; note = 2'-O-methylguanosine-3'-phosphate
  modified_base 13: mod_base = OTHER; note = 2'-O-methyladenosine-3'-phosphate
  modified_base 14: mod_base = OTHER; note = 2'-O-methyladenosine-3'-phosphate
  modified_base 15: mod_base = OTHER; note = 2'-O-methyluridine-3'-phosphate
  modified_base 16: mod_base = OTHER; note = 2'-O-methyladenosine-3'-phosphate
  modified_base 17: mod_base = OTHER; note = 2'-O-methyladenosine-3'-phosphate
  modified_base 18: mod_base = OTHER; note = 2'-O-methylcytidine-3'-phosphate
  modified_base 19: mod_base = OTHER; note = 2'-O-methyluridine-3'-phosphate
  modified_base 20: mod_base = OTHER; note = 2'-O-methylcytidine-3'-phosphate
  modified_base 21: mod_base = OTHER; note = 2'-O-methyluridine-3'-phosphate N-[tris(GalNAc-alkyl)-amidodecanoyl)]-4-hydroxyprolinol (Hyp-(GalNAc-alkyl)3)
cagtcgtcccagaataactct

SEQ ID NO: 7115 - RNA, 21 nt, synthetic construct
  source 1..21: mol_type = other RNA
  modified_base 1: mod_base = OTHER; note = 2'-O-methyladenosine-3'-phosphorothioate
  modified_base 2: mod_base = OTHER; note = 2'-O-methylguanosine-3'-phosphorothioate
  modified_base 3: mod_base = OTHER; note = 2'-O-methyluridine-3'-phosphate
  modified_base 4: mod_base = OTHER; note = 2'-O-methylcytidine-3'-phosphate
  modified_base 5: mod_base = OTHER; note = 2'-O-methylguanosine-3'-phosphate
  modified_base 6: mod_base = OTHER; note = 2'-O-methyluridine-3'-phosphate
  modified_base 7: mod_base = OTHER; note = 2'-fluorocytidine-3'-phosphate
  modified_base 8: mod_base = OTHER; note = 2'-O-methylcytidine-3'-phosphate
  modified_base 9: mod_base = OTHER; note = 2'-fluorocytidine-3'-phosphate
  modified_base 10: mod_base = OTHER; note = 2'-fluoroadenosine-3'-phosphate
  modified_base 11: mod_base = OTHER; note = 2'-fluoroguanosine-3'-phosphate
  modified_base 12: mod_base = OTHER; note = 2'-O-methyladenosine-3'-phosphate
  modified_base 13: mod_base = OTHER; note = 2'-O-methyladenosine-3'-phosphate
  modified_base 14: mod_base = OTHER; note = 2'-O-methyluridine-3'-phosphate
  modified_base 15: mod_base = OTHER; note = 2'-O-methyladenosine-3'-phosphate
  modified_base 16: mod_base = OTHER; note = 2'-O-methyladenosine-3'-phosphate
  modified_base 17: mod_base = OTHER; note = 2'-O-methylcytidine-3'-phosphate
  modified_base 18: mod_base = OTHER; note = 2'-O-methyluridine-3'-phosphate
  modified_base 19: mod_base = OTHER; note = 2'-O-methylcytidine-3'-phosphate
  modified_base 20: mod_base = OTHER; note = 2'-O-methyladenosine-3'-phosphate
  modified_base 21: mod_base = OTHER; note = 2'-O-methyluridine-3'-phosphate N-[tris(GalNAc-alkyl)-amidodecanoyl)]-4-hydroxyprolinol (Hyp-(GalNAc-alkyl)3)
agtcgtcccagaataactcat

SEQ ID NO: 7116 - RNA, 21 nt, synthetic construct
  source 1..21: mol_type = other RNA
  modified_base 1: mod_base = OTHER; note = 2'-O-methylguanosine-3'-phosphorothioate
  modified_base 2: mod_base = OTHER; note = 2'-O-methyluridine-3'-phosphorothioate
  modified_base 3: mod_base = OTHER; note = 2'-O-methylcytidine-3'-phosphate
  modified_base 4: mod_base = OTHER; note = 2'-O-methylguanosine-3'-phosphate
  modified_base 5: mod_base = OTHER; note = 2'-O-methyluridine-3'-phosphate
  modified_base 6: mod_base = OTHER; note = 2'-O-methylcytidine-3'-phosphate
  modified_base 7: mod_base = OTHER; note = 2'-fluorocytidine-3'-phosphate
  modified_base 8: mod_base = OTHER; note = 2'-O-methylcytidine-3'-phosphate
  modified_base 9: mod_base = OTHER; note = 2'-fluoroadenosine-3'-phosphate
  modified_base 10: mod_base = OTHER; note = 2'-fluoroguanosine-3'-phosphate
  modified_base 11: mod_base = OTHER; note = 2'-fluoroadenosine-3'-phosphate
  modified_base 12: mod_base = OTHER; note = 2'-O-methyladenosine-3'-phosphate
  modified_base 13: mod_base = OTHER; note = 2'-O-methyluridine-3'-phosphate
  modified_base 14: mod_base = OTHER; note = 2'-O-methyladenosine-3'-phosphate
  modified_base 15: mod_base = OTHER; note = 2'-O-methyladenosine-3'-phosphate
  modified_base 16: mod_base = OTHER; note = 2'-O-methylcytidine-3'-phosphate
  modified_base 17: mod_base = OTHER; note = 2'-O-methyluridine-3'-phosphate
  modified_base 18: mod_base = OTHER; note = 2'-O-methylcytidine-3'-phosphate
  modified_base 19: mod_base = OTHER; note = 2'-O-methyladenosine-3'-phosphate
  modified_base 20: mod_base = OTHER; note = 2'-O-methyluridine-3'-phosphate
  modified_base 21: mod_base = OTHER; note = 2'-O-methyluridine-3'-phosphate N-[tris(GalNAc-alkyl)-amidodecanoyl)]-4-hydroxyprolinol (Hyp-(GalNAc-alkyl)3)
gtcgtcccagaataactcatt

SEQ ID NO: 7117 - RNA, 21 nt, synthetic construct
  source 1..21: mol_type = other RNA
  modified_base 1: mod_base = OTHER; note = 2'-O-methylcytidine-3'-phosphorothioate
  modified_base 2: mod_base = OTHER; note = 2'-O-methylguanosine-3'-phosphorothioate
  modified_base 3: mod_base = OTHER; note = 2'-O-methyluridine-3'-phosphate
  modified_base 4: mod_base = OTHER; note = 2'-O-methylcytidine-3'-phosphate
  modified_base 5: mod_base = OTHER; note = 2'-O-methylcytidine-3'-phosphate
  modified_base 6: mod_base = OTHER; note = 2'-O-methylcytidine-3'-phosphate
  modified_base 7: mod_base = OTHER; note = 2'-fluoroadenosine-3'-phosphate
  modified_base 8: mod_base = OTHER; note = 2'-O-methylguanosine-3'-phosphate
  modified_base 9: mod_base = OTHER; note = 2'-fluoroadenosine-3'-phosphate
  modified_base 10: mod_base = OTHER; note = 2'-fluoroadenosine-3'-phosphate
  modified_base 11: mod_base = OTHER; note = 2'-fluorouridine-3'-phosphate
  modified_base 12: mod_base = OTHER; note = 2'-O-methyladenosine-3'-phosphate
  modified_base 13: mod_base = OTHER; note = 2'-O-methyladenosine-3'-phosphate
  modified_base 14: mod_base = OTHER; note = 2'-O-methylcytidine-3'-phosphate
  modified_base 15: mod_base = OTHER; note = 2'-O-methyluridine-3'-phosphate
  modified_base 16: mod_base = OTHER; note = 2'-O-methylcytidine-3'-phosphate
  modified_base 17: mod_base = OTHER; note = 2'-O-methyladenosine-3'-phosphate
  modified_base 18: mod_base = OTHER; note = 2'-O-methyluridine-3'-phosphate
  modified_base 19: mod_base = OTHER; note = 2'-O-methylcytidine-3'-phosphate
  modified_base 20: mod_base = OTHER; note = 2'-O-methylcytidine-3'-phosphate
  modified_base 21: mod_base = OTHER; note = 2'-O-methyluridine-3'-phosphate N-[tris(GalNAc-alkyl)-amidodecanoyl)]-4-hydroxyprolinol (Hyp-(GalNAc-alkyl)3)
cgtcccagaataactcatcct

SEQ ID NO: 7118 - RNA, 21 nt, synthetic construct
  source 1..21: mol_type = other RNA
  modified_base 1: mod_base = OTHER; note = 2'-O-methyluridine-3'-phosphorothioate
  modified_base 2: mod_base = OTHER; note = 2'-O-methylcytidine-3'-phosphorothioate
  modified_base 3: mod_base = OTHER; note = 2'-O-methylcytidine-3'-phosphate
  modified_base 4: mod_base = OTHER; note = 2'-O-methylcytidine-3'-phosphate
  modified_base 5: mod_base = OTHER; note = 2'-O-methyladenosine-3'-phosphate
  modified_base 6: mod_base = OTHER; note = 2'-O-methylguanosine-3'-phosphate
  modified_base 7: mod_base = OTHER; note = 2'-fluoroadenosine-3'-phosphate
  modified_base 8: mod_base = OTHER; note = 2'-O-methyladenosine-3'-phosphate
  modified_base 9: mod_base = OTHER; note = 2'-fluorouridine-3'-phosphate
  modified_base 10: mod_base = OTHER; note = 2'-fluoroadenosine-3'-phosphate
  modified_base 11: mod_base = OTHER; note = 2'-fluoroadenosine-3'-phosphate
  modified_base 12: mod_base = OTHER; note = 2'-O-methylcytidine-3'-phosphate
  modified_base 13: mod_base = OTHER; note = 2'-O-methyluridine-3'-phosphate
  modified_base 14: mod_base = OTHER; note = 2'-O-methylcytidine-3'-phosphate
  modified_base 15: mod_base = OTHER; note = 2'-O-methyladenosine-3'-phosphate
  modified_base 16: mod_base = OTHER; note = 2'-O-methyluridine-3'-phosphate
  modified_base 17: mod_base = OTHER; note = 2'-O-methylcytidine-3'-phosphate
  modified_base 18: mod_base = OTHER; note = 2'-O-methylcytidine-3'-phosphate
  modified_base 19: mod_base = OTHER; note = 2'-O-methyluridine-3'-phosphate
  modified_base 20: mod_base = OTHER; note = 2'-O-methylcytidine-3'-phosphate
  modified_base 21: mod_base = OTHER; note = 2'-O-methyluridine-3'-phosphate N-[tris(GalNAc-alkyl)-amidodecanoyl)]-4-hydroxyprolinol (Hyp-(GalNAc-alkyl)3)
tcccagaataactcatcctct

SEQ ID NO: 7119 - RNA, 21 nt, synthetic construct
  source 1..21: mol_type = other RNA
  modified_base 1: mod_base = OTHER; note = 2'-O-methylcytidine-3'-phosphorothioate
  modified_base 2: mod_base = OTHER; note = 2'-O-methylcytidine-3'-phosphorothioate
  modified_base 3: mod_base = OTHER; note = 2'-O-methylcytidine-3'-phosphate
  modified_base 4: mod_base = OTHER; note = 2'-O-methyladenosine-3'-phosphate
  modified_base 5: mod_base = OTHER; note = 2'-O-methylguanosine-3'-phosphate
  modified_base 6: mod_base = OTHER; note = 2'-O-methyladenosine-3'-phosphate
  modified_base 7: mod_base = OTHER; note = 2'-fluoroadenosine-3'-phosphate
  modified_base 8: mod_base = OTHER; note = 2'-O-methyluridine-3'-phosphate
  modified_base 9: mod_base = OTHER; note = 2'-fluoroadenosine-3'-phosphate
  modified_base 10: mod_base = OTHER; note = 2'-fluoroadenosine-3'-phosphate
  modified_base 11: mod_base = OTHER; note = 2'-fluorocytidine-3'-phosphate
  modified_base 12: mod_base = OTHER; note = 2'-O-methyluridine-3'-phosphate
  modified_base 13: mod_base = OTHER; note = 2'-O-methylcytidine-3'-phosphate
  modified_base 14: mod_base = OTHER; note = 2'-O-methyladenosine-3'-phosphate
  modified_base 15: mod_base = OTHER; note = 2'-O-methyluridine-3'-phosphate
  modified_base 16: mod_base = OTHER; note = 2'-O-methylcytidine-3'-phosphate
  modified_base 17: mod_base = OTHER; note = 2'-O-methylcytidine-3'-phosphate
  modified_base 18: mod_base = OTHER; note = 2'-O-methyluridine-3'-phosphate
  modified_base 19: mod_base = OTHER; note = 2'-O-methylcytidine-3'-phosphate
  modified_base 20: mod_base = OTHER; note = 2'-O-methylcytidine-3'-phosphate
  modified_base 21: mod_base = OTHER; note = 2'-O-methyluridine-3'-phosphate N-[tris(GalNAc-alkyl)-amidodecanoyl)]-4-hydroxyprolinol (Hyp-(GalNAc-alkyl)3)
cccagaataactcatcctcct

SEQ ID NO: 7120 - RNA, 21 nt, synthetic construct
  source 1..21: mol_type = other RNA
  modified_base 1: mod_base = OTHER; note = 2'-O-methylguanosine-3'-phosphorothioate
  modified_base 2: mod_base = OTHER; note = 2'-O-methylguanosine-3'-phosphorothioate
  modified_base 3: mod_base = OTHER; note = 2'-O-methylguanosine-3'-phosphate
  modified_base 4: mod_base = OTHER; note = 2'-O-methyladenosine-3'-phosphate
  modified_base 5: mod_base = OTHER; note = 2'-O-methylguanosine-3'-phosphate
  modified_base 6: mod_base = OTHER; note = 2'-O-methyluridine-3'-phosphate
  modified_base 7: mod_base = OTHER; note = 2'-fluoroguanosine-3'-phosphate
  modified_base 8: mod_base = OTHER; note = 2'-O-methyluridine-3'-phosphate
  modified_base 9: mod_base = OTHER; note = 2'-fluoroguanosine-3'-phosphate
  modified_base 10: mod_base = OTHER; note = 2'-fluoroguanosine-3'-phosphate
  modified_base 11: mod_base = OTHER; note = 2'-fluorocytidine-3'-phosphate
  modified_base 12: mod_base = OTHER; note = 2'-O-methyluridine-3'-phosphate
  modified_base 13: mod_base = OTHER; note = 2'-O-methylcytidine-3'-phosphate
  modified_base 14: mod_base = OTHER; note = 2'-O-methylcytidine-3'-phosphate
  modified_base 15: mod_base = OTHER; note = 2'-O-methyladenosine-3'-phosphate
  modified_base 16: mod_base = OTHER; note = 2'-O-methylguanosine-3'-phosphate
  modified_base 17: mod_base = OTHER; note = 2'-O-methylguanosine-3'-phosphate
  modified_base 18: mod_base = OTHER; note = 2'-O-methylguanosine-3'-phosphate
  modified_base 19: mod_base = OTHER; note = 2'-O-methyladenosine-3'-phosphate
  modified_base 20: mod_base = OTHER; note = 2'-O-methyladenosine-3'-phosphate
  modified_base 21: mod_base = OTHER; note = 2'-O-methyluridine-3'-phosphate N-[tris(GalNAc-alkyl)-amidodecanoyl)]-4-hydroxyprolinol (Hyp-(GalNAc-alkyl)3)
gggagtgtggctccagggaat

SEQ ID NO: 7121 - RNA, 21 nt, synthetic construct
  source 1..21: mol_type = other RNA
  modified_base 1: mod_base = OTHER; note = 2'-O-methylguanosine-3'-phosphorothioate
  modified_base 2: mod_base = OTHER; note = 2'-O-methyladenosine-3'-phosphorothioate
  modified_base 3: mod_base = OTHER; note = 2'-O-methylguanosine-3'-phosphate
  modified_base 4: mod_base = OTHER; note = 2'-O-methylguanosine-3'-phosphate
  modified_base 5: mod_base = OTHER; note = 2'-O-methyluridine-3'-phosphate
  modified_base 6: mod_base = OTHER; note = 2'-O-methylcytidine-3'-phosphate
  modified_base 7: mod_base = OTHER; note = 2'-fluoroadenosine-3'-phosphate
  modified_base 8: mod_base = OTHER; note = 2'-O-methyluridine-3'-phosphate
  modified_base 9: mod_base = OTHER; note = 2'-fluorocytidine-3'-phosphate
  modified_base 10: mod_base = OTHER; note = 2'-fluoroadenosine-3'-phosphate
  modified_base 11: mod_base = OTHER; note = 2'-fluoroguanosine-3'-phosphate
  modified_base 12: mod_base = OTHER; note = 2'-O-methylcytidine-3'-phosphate
  modified_base 13: mod_base = OTHER; note = 2'-O-methyluridine-3'-phosphate
  modified_base 14: mod_base = OTHER; note = 2'-O-methyluridine-3'-phosphate
  modified_base 15: mod_base = OTHER; note = 2'-O-methyluridine-3'-phosphate
  modified_base 16: mod_base = OTHER; note = 2'-O-methylguanosine-3'-phosphate
  modified_base 17: mod_base = OTHER; note = 2'-O-methylcytidine-3'-phosphate
  modified_base 18: mod_base = OTHER; note = 2'-O-methyluridine-3'-phosphate
  modified_base 19: mod_base = OTHER; note = 2'-O-methyladenosine-3'-phosphate
  modified_base 20: mod_base = OTHER; note = 2'-O-methylcytidine-3'-phosphate
  modified_base 21: mod_base = OTHER; note = 2'-O-methyluridine-3'-phosphate N-[tris(GalNAc-alkyl)-amidodecanoyl)]-4-hydroxyprolinol (Hyp-(GalNAc-alkyl)3)
gaggtcatcagctttgctact

SEQ ID NO: 7122 - RNA, 21 nt, synthetic construct
  source 1..21: mol_type = other RNA
  modified_base 1: mod_base = OTHER; note = 2'-O-methylguanosine-3'-phosphorothioate
  modified_base 2: mod_base = OTHER; note = 2'-O-methyluridine-3'-phosphorothioate
  modified_base 3: mod_base = OTHER; note = 2'-O-methylcytidine-3'-phosphate
  modified_base 4: mod_base = OTHER; note = 2'-O-methyladenosine-3'-phosphate
  modified_base 5: mod_base = OTHER; note = 2'-O-methyluridine-3'-phosphate
  modified_base 6: mod_base = OTHER; note = 2'-O-methylcytidine-3'-phosphate
  modified_base 7: mod_base = OTHER; note = 2'-fluoroadenosine-3'-phosphate
  modified_base 8: mod_base = OTHER; note = 2'-O-methylguanosine-3'-phosphate
  modified_base 9: mod_base = OTHER; note = 2'-fluorocytidine-3'-phosphate
  modified_base 10: mod_base = OTHER; note = 2'-fluorouridine-3'-phosphate
  modified_base 11: mod_base = OTHER; note = 2'-fluorouridine-3'-phosphate
  modified_base 12: mod_base = OTHER; note = 2'-O-methyluridine-3'-phosphate
  modified_base 13: mod_base = OTHER; note = 2'-O-methylguanosine-3'-phosphate
  modified_base 14: mod_base = OTHER; note = 2'-O-methylcytidine-3'-phosphate
  modified_base 15: mod_base = OTHER; note = 2'-O-methyluridine-3'-phosphate
  modified_base 16: mod_base = OTHER; note = 2'-O-methyladenosine-3'-phosphate
  modified_base 17: mod_base = OTHER; note = 2'-O-methylcytidine-3'-phosphate
  modified_base 18: mod_base = OTHER; note = 2'-O-methyluridine-3'-phosphate
  modified_base 19: mod_base = OTHER; note = 2'-O-methylguanosine-3'-phosphate
  modified_base 20: mod_base = OTHER; note = 2'-O-methyluridine-3'-phosphate
  modified_base 21: mod_base = OTHER; note = 2'-O-methyluridine-3'-phosphate N-[tris(GalNAc-alkyl)-amidodecanoyl)]-4-hydroxyprolinol (Hyp-(GalNAc-alkyl)3)
gtcatcagctttgctactgtt

SEQ ID NO: 7123 - RNA, 21 nt, synthetic construct
  source 1..21: mol_type = other RNA
  modified_base 1: mod_base = OTHER; note = 2'-O-methyluridine-3'-phosphorothioate
  modified_base 2: mod_base = OTHER; note = 2'-O-methylcytidine-3'-phosphorothioate
  modified_base 3: mod_base = OTHER; note = 2'-O-methyladenosine-3'-phosphate
  modified_base 4: mod_base = OTHER; note = 2'-O-methyluridine-3'-phosphate
  modified_base 5: mod_base = OTHER; note = 2'-O-methylcytidine-3'-phosphate
  modified_base 6: mod_base = OTHER; note = 2'-O-methyladenosine-3'-phosphate
  modified_base 7: mod_base = OTHER; note = 2'-fluoroguanosine-3'-phosphate
  modified_base 8: mod_base = OTHER; note = 2'-O-methylcytidine-3'-phosphate
  modified_base 9: mod_base = OTHER; note = 2'-fluorouridine-3'-phosphate
  modified_base 10: mod_base = OTHER; note = 2'-fluorouridine-3'-phosphate
  modified_base 11: mod_base = OTHER; note = 2'-fluorouridine-3'-phosphate
  modified_base 12: mod_base = OTHER; note = 2'-O-methylguanosine-3'-phosphate
  modified_base 13: mod_base = OTHER; note = 2'-O-methylcytidine-3'-phosphate
  modified_base 14: mod_base = OTHER; note = 2'-O-methyluridine-3'-phosphate
  modified_base 15: mod_base = OTHER; note = 2'-O-methyladenosine-3'-phosphate
  modified_base 16: mod_base = OTHER; note = 2'-O-methylcytidine-3'-phosphate
  modified_base 17: mod_base = OTHER; note = 2'-O-methyluridine-3'-phosphate
  modified_base 18: mod_base = OTHER; note = 2'-O-methylguanosine-3'-phosphate
  modified_base 19: mod_base = OTHER; note = 2'-O-methyluridine-3'-phosphate
  modified_base 20: mod_base = OTHER; note = 2'-O-methylcytidine-3'-phosphate
  modified_base 21: mod_base = OTHER; note = 2'-O-methyluridine-3'-phosphate N-[tris(GalNAc-alkyl)-amidodecanoyl)]-4-hydroxyprolinol (Hyp-(GalNAc-alkyl)3)
tcatcagctttgctactgtct

SEQ ID NO: 7124 - RNA, 21 nt, synthetic construct
  source 1..21: mol_type = other RNA
  modified_base 1: mod_base = OTHER; note = 2'-O-methylcytidine-3'-phosphorothioate
  modified_base 2: mod_base = OTHER; note = 2'-O-methyladenosine-3'-phosphorothioate
  modified_base 3: mod_base = OTHER; note = 2'-O-methylguanosine-3'-phosphate
  modified_base 4: mod_base = OTHER; note = 2'-O-methylcytidine-3'-phosphate
  modified_base 5: mod_base = OTHER; note = 2'-O-methyluridine-3'-phosphate
  modified_base 6: mod_base = OTHER; note = 2'-O-methyluridine-3'-phosphate
  modified_base 7: mod_base = OTHER; note = 2'-fluorouridine-3'-phosphate
  modified_base 8: mod_base = OTHER; note = 2'-O-methylguanosine-3'-phosphate
  modified_base 9: mod_base = OTHER; note = 2'-fluorocytidine-3'-phosphate
  modified_base 10: mod_base = OTHER; note = 2'-fluorouridine-3'-phosphate
  modified_base 11: mod_base = OTHER; note = 2'-fluoroadenosine-3'-phosphate
  modified_base 12: mod_base = OTHER; note = 2'-O-methylcytidine-3'-phosphate
  modified_base 13: mod_base = OTHER; note = 2'-O-methyluridine-3'-phosphate
  modified_base 14: mod_base = OTHER; note = 2'-O-methylguanosine-3'-phosphate
  modified_base 15: mod_base = OTHER; note = 2'-O-methyluridine-3'-phosphate
  modified_base 16: mod_base = OTHER; note = 2'-O-methylcytidine-3'-phosphate
  modified_base 17: mod_base = OTHER; note = 2'-O-methyladenosine-3'-phosphate
  modified_base 18: mod_base = OTHER; note = 2'-O-methylcytidine-3'-phosphate
  modified_base 19: mod_base = OTHER; note = 2'-O-methyladenosine-3'-phosphate
  modified_base 20: mod_base = OTHER; note = 2'-O-methylguanosine-3'-phosphate
  modified_base 21: mod_base = OTHER; note = 2'-O-methyluridine-3'-phosphate N-[tris(GalNAc-alkyl)-amidodecanoyl)]-4-hydroxyprolinol (Hyp-(GalNAc-alkyl)3)
cagctttgctactgtcacagt

SEQ ID NO: 7125 - RNA, 21 nt, synthetic construct
  source 1..21: mol_type = other RNA
  modified_base 1: mod_base = OTHER; note = 2'-O-methylguanosine-3'-phosphorothioate
  modified_base 2: mod_base = OTHER; note = 2'-O-methylcytidine-3'-phosphorothioate
  modified_base 3: mod_base = OTHER; note = 2'-O-methyluridine-3'-phosphate
  modified_base 4: mod_base = OTHER; note = 2'-O-methyluridine-3'-phosphate
  modified_base 5: mod_base = OTHER; note = 2'-O-methyluridine-3'-phosphate
  modified_base 6: mod_base = OTHER; note = 2'-O-methylguanosine-3'-phosphate
  modified_base 7: mod_base = OTHER; note = 2'-fluorocytidine-3'-phosphate
  modified_base 8: mod_base = OTHER; note = 2'-O-methyluridine-3'-phosphate
  modified_base 9: mod_base = OTHER; note = 2'-fluoroadenosine-3'-phosphate
  modified_base 10: mod_base = OTHER; note = 2'-fluorocytidine-3'-phosphate
  modified_base 11: mod_base = OTHER; note = 2'-fluorouridine-3'-phosphate
  modified_base 12: mod_base = OTHER; note = 2'-O-methylguanosine-3'-phosphate
  modified_base 13: mod_base = OTHER; note = 2'-O-methyluridine-3'-phosphate
  modified_base 14: mod_base = OTHER; note = 2'-O-methylcytidine-3'-phosphate
  modified_base 15: mod_base = OTHER; note = 2'-O-methyladenosine-3'-phosphate
  modified_base 16: mod_base = OTHER; note = 2'-O-methylcytidine-3'-phosphate
  modified_base 17: mod_base = OTHER; note = 2'-O-methyladenosine-3'-phosphate
  modified_base 18: mod_base = OTHER; note = 2'-O-methylguanosine-3'-phosphate
  modified_base 19: mod_base = OTHER; note = 2'-O-methyladenosine-3'-phosphate
  modified_base 20: mod_base = OTHER; note = 2'-O-methylcytidine-3'-phosphate
  modified_base 21: mod_base = OTHER; note = 2'-O-methyluridine-3'-phosphate N-[tris(GalNAc-alkyl)-amidodecanoyl)]-4-hydroxyprolinol (Hyp-(GalNAc-alkyl)3)
gctttgctactgtcacagact

SEQ ID NO: 7126 - RNA, 21 nt, synthetic construct
  source 1..21: mol_type = other RNA
  modified_base 1: mod_base = OTHER; note = 2'-O-methyluridine-3'-phosphorothioate
  modified_base 2: mod_base = OTHER; note = 2'-O-methyluridine-3'-phosphorothioate
  modified_base 3: mod_base = OTHER; note = 2'-O-methyluridine-3'-phosphate
  modified_base 4: mod_base = OTHER; note = 2'-O-methylguanosine-3'-phosphate
  modified_base 5: mod_base = OTHER; note = 2'-O-methylcytidine-3'-phosphate
  modified_base 6: mod_base = OTHER; note = 2'-O-methyluridine-3'-phosphate
  modified_base 7: mod_base = OTHER; note = 2'-fluoroadenosine-3'-phosphate
  modified_base 8: mod_base = OTHER; note = 2'-O-methylcytidine-3'-phosphate
  modified_base 9: mod_base = OTHER; note = 2'-fluorouridine-3'-phosphate
  modified_base 10: mod_base = OTHER; note = 2'-fluoroguanosine-3'-phosphate
  modified_base 11: mod_base = OTHER; note = 2'-fluorouridine-3'-phosphate
  modified_base 12: mod_base = OTHER; note = 2'-O-methylcytidine-3'-phosphate
  modified_base 13: mod_base = OTHER; note = 2'-O-methyladenosine-3'-phosphate
  modified_base 14: mod_base = OTHER; note = 2'-O-methylcytidine-3'-phosphate
  modified_base 15: mod_base = OTHER; note = 2'-O-methyladenosine-3'-phosphate
  modified_base 16: mod_base = OTHER; note = 2'-O-methylguanosine-3'-phosphate
  modified_base 17: mod_base = OTHER; note = 2'-O-methyladenosine-3'-phosphate
  modified_base 18: mod_base = OTHER; note = 2'-O-methylcytidine-3'-phosphate
  modified_base 19: mod_base = OTHER; note = 2'-O-methyluridine-3'-phosphate
  modified_base 20: mod_base = OTHER; note = 2'-O-methylcytidine-3'-phosphate
  modified_base 21: mod_base = OTHER; note = 2'-O-methyluridine-3'-phosphate N-[tris(GalNAc-alkyl)-amidodecanoyl)]-4-hydroxyprolinol (Hyp-(GalNAc-alkyl)3)
tttgctactgtcacagactct

SEQ ID NO: 7127 - RNA, 21 nt, synthetic construct
  source 1..21: mol_type = other RNA
  modified_base 1: mod_base = OTHER; note = 2'-O-methyluridine-3'-phosphorothioate
  modified_base 2: mod_base = OTHER; note = 2'-O-methylguanosine-3'-phosphorothioate
  modified_base 3: mod_base = OTHER; note = 2'-O-methylcytidine-3'-phosphate
  modified_base 4: mod_base = OTHER; note = 2'-O-methyluridine-3'-phosphate
  modified_base 5: mod_base = OTHER; note = 2'-O-methyladenosine-3'-phosphate
  modified_base 6: mod_base = OTHER; note = 2'-O-methylcytidine-3'-phosphate
  modified_base 7: mod_base = OTHER; note = 2'-fluorouridine-3'-phosphate
  modified_base 8: mod_base = OTHER; note = 2'-O-methylguanosine-3'-phosphate
  modified_base 9: mod_base = OTHER; note = 2'-fluorouridine-3'-phosphate
  modified_base 10: mod_base = OTHER; note = 2'-fluorocytidine-3'-phosphate
  modified_base 11: mod_base = OTHER; note = 2'-fluoroadenosine-3'-phosphate
  modified_base 12: mod_base = OTHER; note = 2'-O-methylcytidine-3'-phosphate
  modified_base 13: mod_base = OTHER; note = 2'-O-methyladenosine-3'-phosphate
  modified_base 14: mod_base = OTHER; note = 2'-O-methylguanosine-3'-phosphate
  modified_base 15: mod_base = OTHER; note = 2'-O-methyladenosine-3'-phosphate
  modified_base 16: mod_base = OTHER; note = 2'-O-methylcytidine-3'-phosphate
  modified_base 17: mod_base = OTHER; note = 2'-O-methyluridine-3'-phosphate
  modified_base 18: mod_base = OTHER; note = 2'-O-methylcytidine-3'-phosphate
  modified_base 19: mod_base = OTHER; note = 2'-O-methylcytidine-3'-phosphate
  modified_base 20: mod_base = OTHER; note = 2'-O-methyladenosine-3'-phosphate
  modified_base 21: mod_base = OTHER; note = 2'-O-methyluridine-3'-phosphate N-[tris(GalNAc-alkyl)-amidodecanoyl)]-4-hydroxyprolinol (Hyp-(GalNAc-alkyl)3)
tgctactgtcacagactccat

SEQ ID NO: 7128 - RNA, 21 nt, synthetic construct
  source 1..21: mol_type = other RNA
  modified_base 1: mod_base = OTHER; note = 2'-O-methyluridine-3'-phosphorothioate
  modified_base 2: mod_base = OTHER; note = 2'-O-methylcytidine-3'-phosphorothioate
  modified_base 3: mod_base = OTHER; note = 2'-O-methyladenosine-3'-phosphate
  modified_base 4: mod_base = OTHER; note = 2'-O-methylcytidine-3'-phosphate
  modified_base 5: mod_base = OTHER; note = 2'-O-methyladenosine-3'-phosphate
  modified_base 6: mod_base = OTHER; note = 2'-O-methylguanosine-3'-phosphate
  modified_base 7: mod_base = OTHER; note = 2'-fluoroadenosine-3'-phosphate
  modified_base 8: mod_base = OTHER; note = 2'-O-methylcytidine-3'-phosphate
  modified_base 9: mod_base = OTHER; note = 2'-fluorouridine-3'-phosphate
  modified_base 10: mod_base = OTHER; note = 2'-fluorocytidine-3'-phosphate
  modified_base 11: mod_base = OTHER; note = 2'-fluorocytidine-3'-phosphate
  modified_base 12: mod_base = OTHER; note = 2'-O-methyladenosine-3'-phosphate
  modified_base 13: mod_base = OTHER; note = 2'-O-methylcytidine-3'-phosphate
  modified_base 14: mod_base = OTHER; note = 2'-O-methyluridine-3'-phosphate
  modified_base 15: mod_base = OTHER; note = 2'-O-methyluridine-3'-phosphate
  modified_base 16: mod_base = OTHER; note = 2'-O-methylcytidine-3'-phosphate
  modified_base 17: mod_base = OTHER; note = 2'-O-methyladenosine-3'-phosphate
  modified_base 18: mod_base = OTHER; note = 2'-O-methylguanosine-3'-phosphate
  modified_base 19: mod_base = OTHER; note = 2'-O-methylcytidine-3'-phosphate
  modified_base 20: mod_base = OTHER; note = 2'-O-methylcytidine-3'-phosphate
  modified_base 21: mod_base = OTHER; note = 2'-O-methyluridine-3'-phosphate N-[tris(GalNAc-alkyl)-amidodecanoyl)]-4-hydroxyprolinol (Hyp-(GalNAc-alkyl)3)
tcacagactccacttcagcct

SEQ ID NO: 7129 - RNA, 21 nt, synthetic construct
  source 1..21: mol_type = other RNA
  modified_base 1: mod_base = OTHER; note = 2'-O-methyladenosine-3'-phosphorothioate
  modified_base 2: mod_base = OTHER; note = 2'-O-methylcytidine-3'-phosphorothioate
  modified_base 3: mod_base = OTHER; note = 2'-O-methyladenosine-3'-phosphate
  modified_base 4: mod_base = OTHER; note = 2'-O-methylguanosine-3'-phosphate
  modified_base 5: mod_base = OTHER; note = 2'-O-methyladenosine-3'-phosphate
  modified_base 6: mod_base = OTHER; note = 2'-O-methylcytidine-3'-phosphate
  modified_base 7: mod_base = OTHER; note = 2'-fluorouridine-3'-phosphate
  modified_base 8: mod_base = OTHER; note = 2'-O-methylcytidine-3'-phosphate
  modified_base 9: mod_base = OTHER; note = 2'-fluorocytidine-3'-phosphate
  modified_base 10: mod_base = OTHER; note = 2'-fluoroadenosine-3'-phosphate
  modified_base 11: mod_base = OTHER; note = 2'-fluorocytidine-3'-phosphate
  modified_base 12: mod_base = OTHER; note = 2'-O-methyluridine-3'-phosphate
  modified_base 13: mod_base = OTHER; note = 2'-O-methyluridine-3'-phosphate
  modified_base 14: mod_base = OTHER; note = 2'-O-methylcytidine-3'-phosphate
  modified_base 15: mod_base = OTHER; note = 2'-O-methyladenosine-3'-phosphate
  modified_base 16: mod_base = OTHER; note = 2'-O-methylguanosine-3'-phosphate
  modified_base 17: mod_base = OTHER; note = 2'-O-methylcytidine-3'-phosphate
  modified_base 18: mod_base = OTHER; note = 2'-O-methylcytidine-3'-phosphate
  modified_base 19: mod_base = OTHER; note = 2'-O-methyluridine-3'-phosphate
  modified_base 20: mod_base = OTHER; note = 2'-O-methyladenosine-3'-phosphate
  modified_base 21: mod_base = OTHER; note = 2'-O-methyluridine-3'-phosphate N-[tris(GalNAc-alkyl)-amidodecanoyl)]-4-hydroxyprolinol (Hyp-(GalNAc-alkyl)3)
acagactccacttcagcctat

SEQ ID NO: 7130 - RNA, 21 nt, synthetic construct
  source 1..21: mol_type = other RNA
  modified_base 1: mod_base = OTHER; note = 2'-O-methyladenosine-3'-phosphorothioate
  modified_base 2: mod_base = OTHER; note = 2'-O-methylcytidine-3'-phosphorothioate
  modified_base 3: mod_base = OTHER; note = 2'-O-methyluridine-3'-phosphate
  modified_base 4: mod_base = OTHER; note = 2'-O-methylcytidine-3'-phosphate
  modified_base 5: mod_base = OTHER; note = 2'-O-methylcytidine-3'-phosphate
  modified_base 6: mod_base = OTHER; note = 2'-O-methyladenosine-3'-phosphate
  modified_base 7: mod_base = OTHER; note = 2'-fluorocytidine-3'-phosphate
  modified_base 8: mod_base = OTHER; note = 2'-O-methyluridine-3'-phosphate
  modified_base 9: mod_base = OTHER; note = 2'-fluorouridine-3'-phosphate
  modified_base 10: mod_base = OTHER; note = 2'-fluorocytidine-3'-phosphate
  modified_base 11: mod_base = OTHER; note = 2'-fluoroadenosine-3'-phosphate
  modified_base 12: mod_base = OTHER; note = 2'-O-methylguanosine-3'-phosphate
  modified_base 13: mod_base = OTHER; note = 2'-O-methylcytidine-3'-phosphate
  modified_base 14: mod_base = OTHER; note = 2'-O-methylcytidine-3'-phosphate
  modified_base 15: mod_base = OTHER; note = 2'-O-methyluridine-3'-phosphate
  modified_base 16: mod_base = OTHER; note = 2'-O-methyladenosine-3'-phosphate
  modified_base 17: mod_base = OTHER; note = 2'-O-methylcytidine-3'-phosphate
  modified_base 18: mod_base = OTHER; note = 2'-O-methyladenosine-3'-phosphate
  modified_base 19: mod_base = OTHER; note = 2'-O-methylguanosine-3'-phosphate
  modified_base 20: mod_base = OTHER; note = 2'-O-methylcytidine-3'-phosphate
  modified_base 21: mod_base = OTHER; note = 2'-O-methyluridine-3'-phosphate N-[tris(GalNAc-alkyl)-amidodecanoyl)]-4-hydroxyprolinol (Hyp-(GalNAc-alkyl)3)
actccacttcagcctacagct

SEQ ID NO: 7131 - RNA, 21 nt, synthetic construct
  source 1..21: mol_type = other RNA
  modified_base 1: mod_base = OTHER; note = 2'-O-methylcytidine-3'-phosphorothioate
  modified_base 2: mod_base = OTHER; note = 2'-O-methyluridine-3'-phosphorothioate
  modified_base 3: mod_base = OTHER; note = 2'-O-methylcytidine-3'-phosphate
  modified_base 4: mod_base = OTHER; note = 2'-O-methylcytidine-3'-phosphate
  modified_base 5: mod_base = OTHER; note = 2'-O-methyladenosine-3'-phosphate
  modified_base 6: mod_base = OTHER; note = 2'-O-methylcytidine-3'-phosphate
  modified_base 7: mod_base = OTHER; note = 2'-fluorouridine-3'-phosphate
  modified_base 8: mod_base = OTHER; note = 2'-O-methyluridine-3'-phosphate
  modified_base 9: mod_base = OTHER; note = 2'-fluorocytidine-3'-phosphate
  modified_base 10: mod_base = OTHER; note = 2'-fluoroadenosine-3'-phosphate
  modified_base 11: mod_base = OTHER; note = 2'-fluoroguanosine-3'-phosphate
  modified_base 12: mod_base = OTHER; note = 2'-O-methylcytidine-3'-phosphate
  modified_base 13: mod_base = OTHER; note = 2'-O-methylcytidine-3'-phosphate
  modified_base 14: mod_base = OTHER; note = 2'-O-methyluridine-3'-phosphate
  modified_base 15: mod_base = OTHER; note = 2'-O-methyladenosine-3'-phosphate
  modified_base 16: mod_base = OTHER; note = 2'-O-methylcytidine-3'-phosphate
  modified_base 17: mod_base = OTHER; note = 2'-O-methyladenosine-3'-phosphate
  modified_base 18: mod_base = OTHER; note = 2'-O-methylguanosine-3'-phosphate
  modified_base 19: mod_base = OTHER; note = 2'-O-methylcytidine-3'-phosphate
  modified_base 20: mod_base = OTHER; note = 2'-O-methyluridine-3'-phosphate
  modified_base 21: mod_base = OTHER; note = 2'-O-methyluridine-3'-phosphate N-[tris(GalNAc-alkyl)-amidodecanoyl)]-4-hydroxyprolinol (Hyp-(GalNAc-alkyl)3)
ctccacttcagcctacagctt

SEQ ID NO: 7132 - RNA, 21 nt, synthetic construct
  source 1..21: mol_type = other RNA
  modified_base 1: mod_base = OTHER; note = 2'-O-methylcytidine-3'-phosphorothioate
  modified_base 2: mod_base = OTHER; note = 2'-O-methylcytidine-3'-phosphorothioate
  modified_base 3: mod_base = OTHER; note = 2'-O-methyladenosine-3'-phosphate
  modified_base 4: mod_base = OTHER; note = 2'-O-methylcytidine-3'-phosphate
  modified_base 5: mod_base = OTHER; note = 2'-O-methyluridine-3'-phosphate
  modified_base 6: mod_base = OTHER; note = 2'-O-methyluridine-3'-phosphate
  modified_base 7: mod_base = OTHER; note = 2'-fluorocytidine-3'-phosphate
  modified_base 8: mod_base = OTHER; note = 2'-O-methyladenosine-3'-phosphate
  modified_base 9: mod_base = OTHER; note = 2'-fluoroguanosine-3'-phosphate
  modified_base 10: mod_base = OTHER; note = 2'-fluorocytidine-3'-phosphate
  modified_base 11: mod_base = OTHER; note = 2'-fluorocytidine-3'-phosphate
  modified_base 12: mod_base = OTHER; note = 2'-O-methyluridine-3'-phosphate
  modified_base 13: mod_base = OTHER; note = 2'-O-methyladenosine-3'-phosphate
  modified_base 14: mod_base = OTHER; note = 2'-O-methylcytidine-3'-phosphate
  modified_base 15: mod_base = OTHER; note = 2'-O-methyladenosine-3'-phosphate
  modified_base 16: mod_base = OTHER; note = 2'-O-methylguanosine-3'-phosphate
  modified_base 17: mod_base = OTHER; note = 2'-O-methylcytidine-3'-phosphate
  modified_base 18: mod_base = OTHER; note = 2'-O-methyluridine-3'-phosphate
  modified_base 19: mod_base = OTHER; note = 2'-O-methylcytidine-3'-phosphate
  modified_base 20: mod_base = OTHER; note = 2'-O-methylcytidine-3'-phosphate
  modified_base 21: mod_base = OTHER; note = 2'-O-methyluridine-3'-phosphate N-[tris(GalNAc-alkyl)-amidodecanoyl)]-4-hydroxyprolinol (Hyp-(GalNAc-alkyl)3)
ccacttcagcctacagctcct

SEQ ID NO: 7133 - RNA, 21 nt, synthetic construct
  source 1..21: mol_type = other RNA
  modified_base 1: mod_base = OTHER; note = 2'-O-methyluridine-3'-phosphorothioate
  modified_base 2: mod_base = OTHER; note = 2'-O-methylguanosine-3'-phosphorothioate
  modified_base 3: mod_base = OTHER; note = 2'-O-methylguanosine-3'-phosphate
  modified_base 4: mod_base = OTHER; note = 2'-O-methylcytidine-3'-phosphate
  modified_base 5: mod_base = OTHER; note = 2'-O-methyladenosine-3'-phosphate
  modified_base 6: mod_base = OTHER; note = 2'-O-methylcytidine-3'-phosphate
  modified_base 7: mod_base = OTHER; note = 2'-fluorouridine-3'-phosphate
  modified_base 8: mod_base = OTHER; note = 2'-O-methylcytidine-3'-phosphate
  modified_base 9: mod_base = OTHER; note = 2'-fluorouridine-3'-phosphate
  modified_base 10: mod_base = OTHER; note = 2'-fluorouridine-3'-phosphate
  modified_base 11: mod_base = OTHER; note = 2'-fluorouridine-3'-phosphate
  modified_base 12: mod_base = OTHER; note = 2'-O-methylguanosine-3'-phosphate
  modified_base 13: mod_base = OTHER; note = 2'-O-methylcytidine-3'-phosphate
  modified_base 14: mod_base = OTHER; note = 2'-O-methyluridine-3'-phosphate
  modified_base 15: mod_base = OTHER; note = 2'-O-methyluridine-3'-phosphate
  modified_base 16: mod_base = OTHER; note = 2'-O-methylguanosine-3'-phosphate
  modified_base 17: mod_base = OTHER; note = 2'-O-methyladenosine-3'-phosphate
  modified_base 18: mod_base = OTHER; note = 2'-O-methylguanosine-3'-phosphate
  modified_base 19: mod_base = OTHER; note = 2'-O-methylguanosine-3'-phosphate
  modified_base 20: mod_base = OTHER; note = 2'-O-methyladenosine-3'-phosphate
  modified_base 21: mod_base = OTHER; note = 2'-O-methyluridine-3'-phosphate N-[tris(GalNAc-alkyl)-amidodecanoyl)]-4-hydroxyprolinol (Hyp-(GalNAc-alkyl)3)
tggcactctttgcttgaggat

SEQ ID NO: 7134 - RNA, 21 nt, synthetic construct
  source 1..21: mol_type = other RNA
  modified_base 1: mod_base = OTHER; note = 2'-O-methylguanosine-3'-phosphorothioate
  modified_base 2: mod_base = OTHER; note = 2'-O-methylcytidine-3'-phosphorothioate
  modified_base 3: mod_base = OTHER; note = 2'-O-methyladenosine-3'-phosphate
  modified_base 4: mod_base = OTHER; note = 2'-O-methylcytidine-3'-phosphate
  modified_base 5: mod_base = OTHER; note = 2'-O-methyluridine-3'-phosphate
  modified_base 6: mod_base = OTHER; note = 2'-O-methylcytidine-3'-phosphate
  modified_base 7: mod_base = OTHER; note = 2'-fluorouridine-3'-phosphate
  modified_base 8: mod_base = OTHER; note = 2'-O-methyluridine-3'-phosphate
  modified_base 9: mod_base = OTHER; note = 2'-fluorouridine-3'-phosphate
  modified_base 10: mod_base = OTHER; note = 2'-fluoroguanosine-3'-phosphate
  modified_base 11: mod_base = OTHER; note = 2'-fluorocytidine-3'-phosphate
  modified_base 12: mod_base = OTHER; note = 2'-O-methyluridine-3'-phosphate
  modified_base 13: mod_base = OTHER; note = 2'-O-methyluridine-3'-phosphate
  modified_base 14: mod_base = OTHER; note = 2'-O-methylguanosine-3'-phosphate
  modified_base 15: mod_base = OTHER; note = 2'-O-methyladenosine-3'-phosphate
  modified_base 16: mod_base = OTHER; note = 2'-O-methylguanosine-3'-phosphate
  modified_base 17: mod_base = OTHER; note = 2'-O-methylguanosine-3'-phosphate
  modified_base 18: mod_base = OTHER; note = 2'-O-methyladenosine-3'-phosphate
  modified_base 19: mod_base = OTHER; note = 2'-O-methyluridine-3'-phosphate
  modified_base 20: mod_base = OTHER; note = 2'-O-methylcytidine-3'-phosphate
  modified_base 21: mod_base = OTHER; note = 2'-O-methyluridine-3'-phosphate N-[tris(GalNAc-alkyl)-amidodecanoyl)]-4-hydroxyprolinol (Hyp-(GalNAc-alkyl)3)
gcactctttgcttgaggatct

SEQ ID NO: 7135 - RNA, 21 nt, synthetic construct
  source 1..21: mol_type = other RNA
  modified_base 1: mod_base = OTHER; note = 2'-O-methyluridine-3'-phosphorothioate
  modified_base 2: mod_base = OTHER; note = 2'-O-methylcytidine-3'-phosphorothioate
  modified_base 3: mod_base = OTHER; note = 2'-O-methyluridine-3'-phosphate
  modified_base 4: mod_base = OTHER; note = 2'-O-methyluridine-3'-phosphate
  modified_base 5: mod_base = OTHER; note = 2'-O-methyluridine-3'-phosphate
  modified_base 6: mod_base = OTHER; note = 2'-O-methylguanosine-3'-phosphate
  modified_base 7: mod_base = OTHER; note = 2'-fluorocytidine-3'-phosphate
  modified_base 8: mod_base = OTHER; note = 2'-O-methyluridine-3'-phosphate
  modified_base 9: mod_base = OTHER; note = 2'-fluorouridine-3'-phosphate
  modified_base 10: mod_base = OTHER; note = 2'-fluoroguanosine-3'-phosphate
  modified_base 11: mod_base = OTHER; note = 2'-fluoroadenosine-3'-phosphate
  modified_base 12: mod_base = OTHER; note = 2'-O-methylguanosine-3'-phosphate
  modified_base 13: mod_base = OTHER; note = 2'-O-methylguanosine-3'-phosphate
  modified_base 14: mod_base = OTHER; note = 2'-O-methyladenosine-3'-phosphate
  modified_base 15: mod_base = OTHER; note = 2'-O-methyluridine-3'-phosphate
  modified_base 16: mod_base = OTHER; note = 2'-O-methylcytidine-3'-phosphate
  modified_base 17: mod_base = OTHER; note = 2'-O-methyluridine-3'-phosphate
  modified_base 18: mod_base = OTHER; note = 2'-O-methyluridine-3'-phosphate
  modified_base 19: mod_base = OTHER; note = 2'-O-methylcytidine-3'-phosphate
  modified_base 20: mod_base = OTHER; note = 2'-O-methylcytidine-3'-phosphate
  modified_base 21: mod_base = OTHER; note = 2'-O-methyluridine-3'-phosphate N-[tris(GalNAc-alkyl)-amidodecanoyl)]-4-hydroxyprolinol (Hyp-(GalNAc-alkyl)3)
tctttgcttgaggatcttcct

SEQ ID NO: 7136 - RNA, 21 nt, synthetic construct
  source 1..21: mol_type = other RNA
  modified_base 1: mod_base = OTHER; note = 2'-O-methyluridine-3'-phosphorothioate
  modified_base 2: mod_base = OTHER; note = 2'-O-methyluridine-3'-phosphorothioate
  modified_base 3: mod_base = OTHER; note = 2'-O-methyluridine-3'-phosphate
  modified_base 4: mod_base = OTHER; note = 2'-O-methylguanosine-3'-phosphate
  modified_base 5: mod_base = OTHER; note = 2'-O-methylcytidine-3'-phosphate
  modified_base 6: mod_base = OTHER; note = 2'-O-methyluridine-3'-phosphate
  modified_base 7: mod_base = OTHER; note = 2'-fluorouridine-3'-phosphate
  modified_base 8: mod_base = OTHER; note = 2'-O-methylguanosine-3'-phosphate
  modified_base 9: mod_base = OTHER; note = 2'-fluoroadenosine-3'-phosphate
  modified_base 10: mod_base = OTHER; note = 2'-fluoroguanosine-3'-phosphate
  modified_base 11: mod_base = OTHER; note = 2'-fluoroguanosine-3'-phosphate
  modified_base 12: mod_base = OTHER; note = 2'-O-methyladenosine-3'-phosphate
  modified_base 13: mod_base = OTHER; note = 2'-O-methyluridine-3'-phosphate
  modified_base 14: mod_base = OTHER; note = 2'-O-methylcytidine-3'-phosphate
  modified_base 15: mod_base = OTHER; note = 2'-O-methyluridine-3'-phosphate
  modified_base 16: mod_base = OTHER; note = 2'-O-methyluridine-3'-phosphate
  modified_base 17: mod_base = OTHER; note = 2'-O-methylcytidine-3'-phosphate
  modified_base 18: mod_base = OTHER; note = 2'-O-methylcytidine-3'-phosphate
  modified_base 19: mod_base = OTHER; note = 2'-O-methylguanosine-3'-phosphate
  modified_base 20: mod_base = OTHER; note = 2'-O-methyladenosine-3'-phosphate
  modified_base 21: mod_base = OTHER; note = 2'-O-methyluridine-3'-phosphate N-[tris(GalNAc-alkyl)-amidodecanoyl)]-4-hydroxyprolinol (Hyp-(GalNAc-alkyl)3)
tttgcttgaggatcttccgat

SEQ ID NO: 7137 - RNA, 21 nt, synthetic construct
  source 1..21: mol_type = other RNA
  modified_base 1: mod_base = OTHER; note = 2'-O-methyluridine-3'-phosphorothioate
  modified_base 2: mod_base = OTHER; note = 2'-O-methylguanosine-3'-phosphorothioate
  modified_base 3: mod_base = OTHER; note = 2'-O-methylguanosine-3'-phosphate
  modified_base 4: mod_base = OTHER; note = 2'-O-methylcytidine-3'-phosphate
  modified_base 5: mod_base = OTHER; note = 2'-O-methyluridine-3'-phosphate
  modified_base 6: mod_base = OTHER; note = 2'-O-methylguanosine-3'-phosphate
  modified_base 7: mod_base = OTHER; note = 2'-fluoroadenosine-3'-phosphate
  modified_base 8: mod_base = OTHER; note = 2'-O-methylguanosine-3'-phosphate
  modified_base 9: mod_base = OTHER; note = 2'-fluorocytidine-3'-phosphate
  modified_base 10: mod_base = OTHER; note = 2'-fluoroadenosine-3'-phosphate
  modified_base 11: mod_base = OTHER; note = 2'-fluorocytidine-3'-phosphate
  modified_base 12: mod_base = OTHER; note = 2'-O-methylcytidine-3'-phosphate
  modified_base 13: mod_base = OTHER; note = 2'-O-methyladenosine-3'-phosphate
  modified_base 14: mod_base = OTHER; note = 2'-O-methylcytidine-3'-phosphate
  modified_base 15: mod_base = OTHER; note = 2'-O-methyladenosine-3'-phosphate
  modified_base 16: mod_base = OTHER; note = 2'-O-methyluridine-3'-phosphate
  modified_base 17: mod_base = OTHER; note = 2'-O-methylcytidine-3'-phosphate
  modified_base 18: mod_base = OTHER; note = 2'-O-methyladenosine-3'-phosphate
  modified_base 19: mod_base = OTHER; note = 2'-O-methylcytidine-3'-phosphate
  modified_base 20: mod_base = OTHER; note = 2'-O-methylcytidine-3'-phosphate
  modified_base 21: mod_base = OTHER; note = 2'-O-methyluridine-3'-phosphate N-[tris(GalNAc-alkyl)-amidodecanoyl)]-4-hydroxyprolinol (Hyp-(GalNAc-alkyl)3)
tggctgagcaccacatcacct

SEQ ID NO: 7138 - RNA, 21 nt, synthetic construct
  source 1..21: mol_type = other RNA
  modified_base 1: mod_base = OTHER; note = 2'-O-methylguanosine-3'-phosphorothioate
  modified_base 2: mod_base = OTHER; note = 2'-O-methylguanosine-3'-phosphorothioate
  modified_base 3: mod_base = OTHER; note = 2'-O-methylcytidine-3'-phosphate
  modified_base 4: mod_base = OTHER; note = 2'-O-methyluridine-3'-phosphate
  modified_base 5: mod_base = OTHER; note = 2'-O-methylguanosine-3'-phosphate
  modified_base 6: mod_base = OTHER; note = 2'-O-methyladenosine-3'-phosphate
  modified_base 7: mod_base = OTHER; note = 2'-fluoroguanosine-3'-phosphate
  modified_base 8: mod_base = OTHER; note = 2'-O-methylcytidine-3'-phosphate
  modified_base 9: mod_base = OTHER; note = 2'-fluoroadenosine-3'-phosphate
  modified_base 10: mod_base = OTHER; note = 2'-fluorocytidine-3'-phosphate
  modified_base 11: mod_base = OTHER; note = 2'-fluorocytidine-3'-phosphate
  modified_base 12: mod_base = OTHER; note = 2'-O-methyladenosine-3'-phosphate
  modified_base 13: mod_base = OTHER; note = 2'-O-methylcytidine-3'-phosphate
  modified_base 14: mod_base = OTHER; note = 2'-O-methyladenosine-3'-phosphate
  modified_base 15: mod_base = OTHER; note = 2'-O-methyluridine-3'-phosphate
  modified_base 16: mod_base = OTHER; note = 2'-O-methylcytidine-3'-phosphate
  modified_base 17: mod_base = OTHER; note = 2'-O-methyladenosine-3'-phosphate
  modified_base 18: mod_base = OTHER; note = 2'-O-methylcytidine-3'-phosphate
  modified_base 19: mod_base = OTHER; note = 2'-O-methylcytidine-3'-phosphate
  modified_base 20: mod_base = OTHER; note = 2'-O-methyladenosine-3'-phosphate
  modified_base 21: mod_base = OTHER; note = 2'-O-methyluridine-3'-phosphate N-[tris(GalNAc-alkyl)-amidodecanoyl)]-4-hydroxyprolinol (Hyp-(GalNAc-alkyl)3)
ggctgagcaccacatcaccat

SEQ ID NO: 7139 - RNA, 21 nt, synthetic construct
  source 1..21: mol_type = other RNA
  modified_base 1: mod_base = OTHER; note = 2'-O-methylcytidine-3'-phosphorothioate
  modified_base 2: mod_base = OTHER; note = 2'-O-methyluridine-3'-phosphorothioate
  modified_base 3: mod_base = OTHER; note = 2'-O-methylguanosine-3'-phosphate
  modified_base 4: mod_base = OTHER; note = 2'-O-methyladenosine-3'-phosphate
  modified_base 5: mod_base = OTHER; note = 2'-O-methylguanosine-3'-phosphate
  modified_base 6: mod_base = OTHER; note = 2'-O-methylcytidine-3'-phosphate
  modified_base 7: mod_base = OTHER; note = 2'-fluoroadenosine-3'-phosphate
  modified_base 8: mod_base = OTHER; note = 2'-O-methylcytidine-3'-phosphate
  modified_base 9: mod_base = OTHER; note = 2'-fluorocytidine-3'-phosphate
  modified_base 10: mod_base = OTHER; note = 2'-fluoroadenosine-3'-phosphate
  modified_base 11: mod_base = OTHER; note = 2'-fluorocytidine-3'-phosphate
  modified_base 12: mod_base = OTHER; note = 2'-O-methyladenosine-3'-phosphate
  modified_base 13: mod_base = OTHER; note = 2'-O-methyluridine-3'-phosphate
  modified_base 14: mod_base = OTHER; note = 2'-O-methylcytidine-3'-phosphate
  modified_base 15: mod_base = OTHER; note = 2'-O-methyladenosine-3'-phosphate
  modified_base 16: mod_base = OTHER; note = 2'-O-methylcytidine-3'-phosphate
  modified_base 17: mod_base = OTHER; note = 2'-O-methylcytidine-3'-phosphate
  modified_base 18: mod_base = OTHER; note = 2'-O-methyladenosine-3'-phosphate
  modified_base 19: mod_base = OTHER; note = 2'-O-methyladenosine-3'-phosphate
  modified_base 20: mod_base = OTHER; note = 2'-O-methylcytidine-3'-phosphate
  modified_base 21: mod_base = OTHER; note = 2'-O-methyluridine-3'-phosphate N-[tris(GalNAc-alkyl)-amidodecanoyl)]-4-hydroxyprolinol (Hyp-(GalNAc-alkyl)3)
ctgagcaccacatcaccaact

SEQ ID NO: 7140 - RNA, 21 nt, synthetic construct
  source 1..21: mol_type = other RNA
  modified_base 1: mod_base = OTHER; note = 2'-O-methylcytidine-3'-phosphorothioate
  modified_base 2: mod_base = OTHER; note = 2'-O-methylcytidine-3'-phosphorothioate
  modified_base 3: mod_base = OTHER; note = 2'-O-methyladenosine-3'-phosphate
  modified_base 4: mod_base = OTHER; note = 2'-O-methylcytidine-3'-phosphate
  modified_base 5: mod_base = OTHER; note = 2'-O-methyladenosine-3'-phosphate
  modified_base 6: mod_base = OTHER; note = 2'-O-methyluridine-3'-phosphate
  modified_base 7: mod_base = OTHER; note = 2'-fluorocytidine-3'-phosphate
  modified_base 8: mod_base = OTHER; note = 2'-O-methyladenosine-3'-phosphate
  modified_base 9: mod_base = OTHER; note = 2'-fluorocytidine-3'-phosphate
  modified_base 10: mod_base = OTHER; note = 2'-fluorocytidine-3'-phosphate
  modified_base 11: mod_base = OTHER; note = 2'-fluoroadenosine-3'-phosphate
  modified_base 12: mod_base = OTHER; note = 2'-O-methyladenosine-3'-phosphate
  modified_base 13: mod_base = OTHER; note = 2'-O-methylcytidine-3'-phosphate
  modified_base 14: mod_base = OTHER; note = 2'-O-methylcytidine-3'-phosphate
  modified_base 15: mod_base = OTHER; note = 2'-O-methyluridine-3'-phosphate
  modified_base 16: mod_base = OTHER; note = 2'-O-methylguanosine-3'-phosphate
  modified_base 17: mod_base = OTHER; note = 2'-O-methylguanosine-3'-phosphate
  modified_base 18: mod_base = OTHER; note = 2'-O-methylguanosine-3'-phosphate
  modified_base 19: mod_base = OTHER; note = 2'-O-methylcytidine-3'-phosphate
  modified_base 20: mod_base = OTHER; note = 2'-O-methyluridine-3'-phosphate
  modified_base 21: mod_base = OTHER; note = 2'-O-methyluridine-3'-phosphate N-[tris(GalNAc-alkyl)-amidodecanoyl)]-4-hydroxyprolinol (Hyp-(GalNAc-alkyl)3)
ccacatcaccaacctgggctt

SEQ ID NO: 7141 - RNA, 21 nt, synthetic construct
  source 1..21: mol_type = other RNA
  modified_base 1: mod_base = OTHER; note = 2'-O-methyluridine-3'-phosphorothioate
  modified_base 2: mod_base = OTHER; note = 2'-O-methylcytidine-3'-phosphorothioate
  modified_base 3: mod_base = OTHER; note = 2'-O-methyladenosine-3'-phosphate
  modified_base 4: mod_base = OTHER; note = 2'-O-methylcytidine-3'-phosphate
  modified_base 5: mod_base = OTHER; note = 2'-O-methylcytidine-3'-phosphate
  modified_base 6: mod_base = OTHER; note = 2'-O-methyladenosine-3'-phosphate
  modified_base 7: mod_base = OTHER; note = 2'-fluoroadenosine-3'-phosphate
  modified_base 8: mod_base = OTHER; note = 2'-O-methylcytidine-3'-phosphate
  modified_base 9: mod_base = OTHER; note = 2'-fluorocytidine-3'-phosphate
  modified_base 10: mod_base = OTHER; note = 2'-fluorouridine-3'-phosphate
  modified_base 11: mod_base = OTHER; note = 2'-fluoroguanosine-3'-phosphate
  modified_base 12: mod_base = OTHER; note = 2'-O-methylguanosine-3'-phosphate
  modified_base 13: mod_base = OTHER; note = 2'-O-methylguanosine-3'-phosphate
  modified_base 14: mod_base = OTHER; note = 2'-O-methylcytidine-3'-phosphate
  modified_base 15: mod_base = OTHER; note = 2'-O-methyluridine-3'-phosphate
  modified_base 16: mod_base = OTHER; note = 2'-O-methylguanosine-3'-phosphate
  modified_base 17: mod_base = OTHER; note = 2'-O-methylguanosine-3'-phosphate
  modified_base 18: mod_base = OTHER; note = 2'-O-methylcytidine-3'-phosphate
  modified_base 19: mod_base = OTHER; note = 2'-O-methyladenosine-3'-phosphate
  modified_base 20: mod_base = OTHER; note = 2'-O-methyluridine-3'-phosphate
  modified_base 21: mod_base = OTHER; note = 2'-O-methyluridine-3'-phosphate N-[tris(GalNAc-alkyl)-amidodecanoyl)]-4-hydroxyprolinol (Hyp-(GalNAc-alkyl)3)
tcaccaacctgggctggcatt

SEQ ID NO: 7142 - RNA, 21 nt, synthetic construct
  source 1..21: mol_type = other RNA
  modified_base 1: mod_base = OTHER; note = 2'-O-methylcytidine-3'-phosphorothioate
  modified_base 2: mod_base = OTHER; note = 2'-O-methylcytidine-3'-phosphorothioate
  modified_base 3: mod_base = OTHER; note = 2'-O-methyluridine-3'-phosphate
  modified_base 4: mod_base = OTHER; note = 2'-O-methyluridine-3'-phosphate
  modified_base 5: mod_base = OTHER; note = 2'-O-methyladenosine-3'-phosphate
  modified_base 6: mod_base = OTHER; note = 2'-O-methyladenosine-3'-phosphate
  modified_base 7: mod_base = OTHER; note = 2'-fluorocytidine-3'-phosphate
  modified_base 8: mod_base = OTHER; note = 2'-O-methyluridine-3'-phosphate
  modified_base 9: mod_base = OTHER; note = 2'-fluorocytidine-3'-phosphate
  modified_base 10: mod_base = OTHER; note = 2'-fluorouridine-3'-phosphate
  modified_base 11: mod_base = OTHER; note = 2'-fluoroguanosine-3'-phosphate
  modified_base 12: mod_base = OTHER; note = 2'-O-methylcytidine-3'-phosphate
  modified_base 13: mod_base = OTHER; note = 2'-O-methylcytidine-3'-phosphate
  modified_base 14: mod_base = OTHER; note = 2'-O-methylcytidine-3'-phosphate
  modified_base 15: mod_base = OTHER; note = 2'-O-methyluridine-3'-phosphate
  modified_base 16: mod_base = OTHER; note = 2'-O-methylcytidine-3'-phosphate
  modified_base 17: mod_base = OTHER; note = 2'-O-methyluridine-3'-phosphate
  modified_base 18: mod_base = OTHER; note = 2'-O-methyladenosine-3'-phosphate
  modified_base 19: mod_base = OTHER; note = 2'-O-methylguanosine-3'-phosphate
  modified_base 20: mod_base = OTHER; note = 2'-O-methyluridine-3'-phosphate
  modified_base 21: mod_base = OTHER; note = 2'-O-methyluridine-3'-phosphate N-[tris(GalNAc-alkyl)-amidodecanoyl)]-4-hydroxyprolinol (Hyp-(GalNAc-alkyl)3)
ccttaactctgccctctagtt

SEQ ID NO: 7143 - RNA, 21 nt, synthetic construct
  source 1..21: mol_type = other RNA
  modified_base 1: mod_base = OTHER; note = 2'-O-methyluridine-3'-phosphorothioate
  modified_base 2: mod_base = OTHER; note = 2'-O-methyladenosine-3'-phosphorothioate
  modified_base 3: mod_base = OTHER; note = 2'-O-methyladenosine-3'-phosphate
  modified_base 4: mod_base = OTHER; note = 2'-O-methylcytidine-3'-phosphate
  modified_base 5: mod_base = OTHER; note = 2'-O-methyluridine-3'-phosphate
  modified_base 6: mod_base = OTHER; note = 2'-O-methylcytidine-3'-phosphate
  modified_base 7: mod_base = OTHER; note = 2'-fluorouridine-3'-phosphate
  modified_base 8: mod_base = OTHER; note = 2'-O-methylguanosine-3'-phosphate
  modified_base 9: mod_base = OTHER; note = 2'-fluorocytidine-3'-phosphate
  modified_base 10: mod_base = OTHER; note = 2'-fluorocytidine-3'-phosphate
  modified_base 11: mod_base = OTHER; note = 2'-fluorocytidine-3'-phosphate
  modified_base 12: mod_base = OTHER; note = 2'-O-methyluridine-3'-phosphate
  modified_base 13: mod_base = OTHER; note = 2'-O-methylcytidine-3'-phosphate
  modified_base 14: mod_base = OTHER; note = 2'-O-methyluridine-3'-phosphate
  modified_base 15: mod_base = OTHER; note = 2'-O-methyladenosine-3'-phosphate
  modified_base 16: mod_base = OTHER; note = 2'-O-methylguanosine-3'-phosphate
  modified_base 17: mod_base = OTHER; note = 2'-O-methyluridine-3'-phosphate
  modified_base 18: mod_base = OTHER; note = 2'-O-methylguanosine-3'-phosphate
  modified_base 19: mod_base = OTHER; note = 2'-O-methylguanosine-3'-phosphate
  modified_base 20: mod_base = OTHER; note = 2'-O-methylcytidine-3'-phosphate
  modified_base 21: mod_base = OTHER; note = 2'-O-methyluridine-3'-phosphate N-[tris(GalNAc-alkyl)-amidodecanoyl)]-4-hydroxyprolinol (Hyp-(GalNAc-alkyl)3)
taactctgccctctagtggct

SEQ ID NO: 7144 - RNA, 21 nt, synthetic construct
  source 1..21: mol_type = other RNA
  modified_base 1: mod_base = OTHER; note = 2'-O-methylguanosine-3'-phosphorothioate
  modified_base 2: mod_base = OTHER; note = 2'-O-methyluridine-3'-phosphorothioate
  modified_base 3: mod_base = OTHER; note = 2'-O-methylcytidine-3'-phosphate
  modified_base 4: mod_base = OTHER; note = 2'-O-methyluridine-3'-phosphate
  modified_base 5: mod_base = OTHER; note = 2'-O-methylguanosine-3'-phosphate
  modified_base 6: mod_base = OTHER; note = 2'-O-methylguanosine-3'-phosphate
  modified_base 7: mod_base = OTHER; note = 2'-fluorouridine-3'-phosphate
  modified_base 8: mod_base = OTHER; note = 2'-O-methylguanosine-3'-phosphate
  modified_base 9: mod_base = OTHER; note = 2'-fluorouridine-3'-phosphate
  modified_base 10: mod_base = OTHER; note = 2'-fluorocytidine-3'-phosphate
  modified_base 11: mod_base = OTHER; note = 2'-fluorocytidine-3'-phosphate
  modified_base 12: mod_base = OTHER; note = 2'-O-methyluridine-3'-phosphate
  modified_base 13: mod_base = OTHER; note = 2'-O-methylguanosine-3'-phosphate
  modified_base 14: mod_base = OTHER; note = 2'-O-methyladenosine-3'-phosphate
  modified_base 15: mod_base = OTHER; note = 2'-O-methyladenosine-3'-phosphate
  modified_base 16: mod_base = OTHER; note = 2'-O-methyladenosine-3'-phosphate
  modified_base 17: mod_base = OTHER; note = 2'-O-methylcytidine-3'-phosphate
  modified_base 18: mod_base = OTHER; note = 2'-O-methyluridine-3'-phosphate
  modified_base 19: mod_base = OTHER; note = 2'-O-methylguanosine-3'-phosphate
  modified_base 20: mod_base = OTHER; note = 2'-O-methylcytidine-3'-phosphate
  modified_base 21: mod_base = OTHER; note = 2'-O-methyluridine-3'-phosphate N-[tris(GalNAc-alkyl)-amidodecanoyl)]-4-hydroxyprolinol (Hyp-(GalNAc-alkyl)3)
gtctggtgtcctgaaactgct

SEQ ID NO: 7145 - RNA, 21 nt, synthetic construct
  source 1..21: mol_type = other RNA
  modified_base 1: mod_base = OTHER; note = 2'-O-methyluridine-3'-phosphorothioate
  modified_base 2: mod_base = OTHER; note = 2'-O-methylcytidine-3'-phosphorothioate
  modified_base 3: mod_base = OTHER; note = 2'-O-methyluridine-3'-phosphate
  modified_base 4: mod_base = OTHER; note = 2'-O-methylguanosine-3'-phosphate
  modified_base 5: mod_base = OTHER; note = 2'-O-methylguanosine-3'-phosphate
  modified_base 6: mod_base = OTHER; note = 2'-O-methyluridine-3'-phosphate
  modified_base 7: mod_base = OTHER; note = 2'-fluoroguanosine-3'-phosphate
  modified_base 8: mod_base = OTHER; note = 2'-O-methyluridine-3'-phosphate
  modified_base 9: mod_base = OTHER; note = 2'-fluorocytidine-3'-phosphate
  modified_base 10: mod_base = OTHER; note = 2'-fluorocytidine-3'-phosphate
  modified_base 11: mod_base = OTHER; note = 2'-fluorouridine-3'-phosphate
  modified_base 12: mod_base = OTHER; note = 2'-O-methylguanosine-3'-phosphate
  modified_base 13: mod_base = OTHER; note = 2'-O-methyladenosine-3'-phosphate
  modified_base 14: mod_base = OTHER; note = 2'-O-methyladenosine-3'-phosphate
  modified_base 15: mod_base = OTHER; note = 2'-O-methyladenosine-3'-phosphate
  modified_base 16: mod_base = OTHER; note = 2'-O-methylcytidine-3'-phosphate
  modified_base 17: mod_base = OTHER; note = 2'-O-methyluridine-3'-phosphate
  modified_base 18: mod_base = OTHER; note = 2'-O-methylguanosine-3'-phosphate
  modified_base 19: mod_base = OTHER; note = 2'-O-methylcytidine-3'-phosphate
  modified_base 20: mod_base = OTHER; note = 2'-O-methyladenosine-3'-phosphate
  modified_base 21: mod_base = OTHER; note = 2'-O-methyluridine-3'-phosphate N-[tris(GalNAc-alkyl)-amidodecanoyl)]-4-hydroxyprolinol (Hyp-(GalNAc-alkyl)3)
tctggtgtcctgaaactgcat

SEQ ID NO: 7146 - RNA, 21 nt, synthetic construct
  source 1..21: mol_type = other RNA
  modified_base 1: mod_base = OTHER; note = 2'-O-methyluridine-3'-phosphorothioate
  modified_base 2: mod_base = OTHER; note = 2'-O-methylguanosine-3'-phosphorothioate
  modified_base 3: mod_base = OTHER; note = 2'-O-methylguanosine-3'-phosphate
  modified_base 4: mod_base = OTHER; note = 2'-O-methyluridine-3'-phosphate
  modified_base 5: mod_base = OTHER; note = 2'-O-methylguanosine-3'-phosphate
  modified_base 6: mod_base = OTHER; note = 2'-O-methyluridine-3'-phosphate
  modified_base 7: mod_base = OTHER; note = 2'-fluorocytidine-3'-phosphate
  modified_base 8: mod_base = OTHER; note = 2'-O-methylcytidine-3'-phosphate
  modified_base 9: mod_base = OTHER; note = 2'-fluorouridine-3'-phosphate
  modified_base 10: mod_base = OTHER; note = 2'-fluoroguanosine-3'-phosphate
  modified_base 11: mod_base = OTHER; note = 2'-fluoroadenosine-3'-phosphate
  modified_base 12: mod_base = OTHER; note = 2'-O-methyladenosine-3'-phosphate
  modified_base 13: mod_base = OTHER; note = 2'-O-methyladenosine-3'-phosphate
  modified_base 14: mod_base = OTHER; note = 2'-O-methylcytidine-3'-phosphate
  modified_base 15: mod_base = OTHER; note = 2'-O-methyluridine-3'-phosphate
  modified_base 16: mod_base = OTHER; note = 2'-O-methylguanosine-3'-phosphate
  modified_base 17: mod_base = OTHER; note = 2'-O-methylcytidine-3'-phosphate
  modified_base 18: mod_base = OTHER; note = 2'-O-methyladenosine-3'-phosphate
  modified_base 19: mod_base = OTHER; note = 2'-O-methyladenosine-3'-phosphate
  modified_base 20: mod_base = OTHER; note = 2'-O-methylcytidine-3'-phosphate
  modified_base 21: mod_base = OTHER; note = 2'-O-methyluridine-3'-phosphate N-[tris(GalNAc-alkyl)-amidodecanoyl)]-4-hydroxyprolinol (Hyp-(GalNAc-alkyl)3)
tggtgtcctgaaactgcaact

SEQ ID NO: 7147 - RNA, 21 nt, synthetic construct
  source 1..21: mol_type = other RNA
  modified_base 1: mod_base = OTHER; note = 2'-O-methylcytidine-3'-phosphorothioate
  modified_base 2: mod_base = OTHER; note = 2'-O-methylcytidine-3'-phosphorothioate
  modified_base 3: mod_base = OTHER; note = 2'-O-methyluridine-3'-phosphate
  modified_base 4: mod_base = OTHER; note = 2'-O-methylguanosine-3'-phosphate
  modified_base 5: mod_base = OTHER; note = 2'-O-methyladenosine-3'-phosphate
  modified_base 6: mod_base = OTHER; note = 2'-O-methyladenosine-3'-phosphate
  modified_base 7: mod_base = OTHER; note = 2'-fluoroadenosine-3'-phosphate
  modified_base 8: mod_base = OTHER; note = 2'-O-methylcytidine-3'-phosphate
  modified_base 9: mod_base = OTHER; note = 2'-fluorouridine-3'-phosphate
  modified_base 10: mod_base = OTHER; note = 2'-fluoroguanosine-3'-phosphate
  modified_base 11: mod_base = OTHER; note = 2'-fluorocytidine-3'-phosphate
  modified_base 12: mod_base = OTHER; note = 2'-O-methyladenosine-3'-phosphate
  modified_base 13: mod_base = OTHER; note = 2'-O-methyladenosine-3'-phosphate
  modified_base 14: mod_base = OTHER; note = 2'-O-methylcytidine-3'-phosphate
  modified_base 15: mod_base = OTHER; note = 2'-O-methyluridine-3'-phosphate
  modified_base 16: mod_base = OTHER; note = 2'-O-methyladenosine-3'-phosphate
  modified_base 17: mod_base = OTHER; note = 2'-O-methylguanosine-3'-phosphate
  modified_base 18: mod_base = OTHER; note = 2'-O-methyladenosine-3'-phosphate
  modified_base 19: mod_base = OTHER; note = 2'-O-methylcytidine-3'-phosphate
  modified_base 20: mod_base = OTHER; note = 2'-O-methyluridine-3'-phosphate
  modified_base 21: mod_base = OTHER; note = 2'-O-methyluridine-3'-phosphate N-[tris(GalNAc-alkyl)-amidodecanoyl)]-4-hydroxyprolinol (Hyp-(GalNAc-alkyl)3)
cctgaaactgcaactagactt

SEQ ID NO: 7148 - RNA, 21 nt, synthetic construct
  source 1..21: mol_type = other RNA
  modified_base 1: mod_base = OTHER; note = 2'-O-methylcytidine-3'-phosphorothioate
  modified_base 2: mod_base = OTHER; note = 2'-O-methyluridine-3'-phosphorothioate
  modified_base 3: mod_base = OTHER; note = 2'-O-methylguanosine-3'-phosphate
  modified_base 4: mod_base = OTHER; note = 2'-O-methyladenosine-3'-phosphate
  modified_base 5: mod_base = OTHER; note = 2'-O-methyladenosine-3'-phosphate
  modified_base 6: mod_base = OTHER; note = 2'-O-methyladenosine-3'-phosphate
  modified_base 7: mod_base = OTHER; note = 2'-fluorocytidine-3'-phosphate
  modified_base 8: mod_base = OTHER; note = 2'-O-methyluridine-3'-phosphate
  modified_base 9: mod_base = OTHER; note = 2'-fluoroguanosine-3'-phosphate
  modified_base 10: mod_base = OTHER; note = 2'-fluorocytidine-3'-phosphate
  modified_base 11: mod_base = OTHER; note = 2'-fluoroadenosine-3'-phosphate
  modified_base 12: mod_base = OTHER; note = 2'-O-methyladenosine-3'-phosphate
  modified_base 13: mod_base = OTHER; note = 2'-O-methylcytidine-3'-phosphate
  modified_base 14: mod_base = OTHER; note = 2'-O-methyluridine-3'-phosphate
  modified_base 15: mod_base = OTHER; note = 2'-O-methyladenosine-3'-phosphate
  modified_base 16: mod_base = OTHER; note = 2'-O-methylguanosine-3'-phosphate
  modified_base 17: mod_base = OTHER; note = 2'-O-methyladenosine-3'-phosphate
  modified_base 18: mod_base = OTHER; note = 2'-O-methylcytidine-3'-phosphate
  modified_base 19: mod_base = OTHER; note = 2'-O-methyluridine-3'-phosphate
  modified_base 20: mod_base = OTHER; note = 2'-O-methylguanosine-3'-phosphate
  modified_base 21: mod_base = OTHER; note = 2'-O-methyluridine-3'-phosphate N-[tris(GalNAc-alkyl)-amidodecanoyl)]-4-hydroxyprolinol (Hyp-(GalNAc-alkyl)3)
ctgaaactgcaactagactgt

SEQ ID NO: 7149 - RNA, 21 nt, synthetic construct
  source 1..21: mol_type = other RNA
  modified_base 1: mod_base = OTHER; note = 2'-O-methylguanosine-3'-phosphorothioate
  modified_base 2: mod_base = OTHER; note = 2'-O-methyladenosine-3'-phosphorothioate
  modified_base 3: mod_base = OTHER; note = 2'-O-methyladenosine-3'-phosphate
  modified_base 4: mod_base = OTHER; note = 2'-O-methyladenosine-3'-phosphate
  modified_base 5: mod_base = OTHER; note = 2'-O-methylcytidine-3'-phosphate
  modified_base 6: mod_base = OTHER; note = 2'-O-methyluridine-3'-phosphate
  modified_base 7: mod_base = OTHER; note = 2'-fluoroguanosine-3'-phosphate
  modified_base 8: mod_base = OTHER; note = 2'-O-methylcytidine-3'-phosphate
  modified_base 9: mod_base = OTHER; note = 2'-fluoroadenosine-3'-phosphate
  modified_base 10: mod_base = OTHER; note = 2'-fluoroadenosine-3'-phosphate
  modified_base 11: mod_base = OTHER; note = 2'-fluorocytidine-3'-phosphate
  modified_base 12: mod_base = OTHER; note = 2'-O-methyluridine-3'-phosphate
  modified_base 13: mod_base = OTHER; note = 2'-O-methyladenosine-3'-phosphate
  modified_base 14: mod_base = OTHER; note = 2'-O-methylguanosine-3'-phosphate
  modified_base 15: mod_base = OTHER; note = 2'-O-methyladenosine-3'-phosphate
  modified_base 16: mod_base = OTHER; note = 2'-O-methylcytidine-3'-phosphate
  modified_base 17: mod_base = OTHER; note = 2'-O-methyluridine-3'-phosphate
  modified_base 18: mod_base = OTHER; note = 2'-O-methylguanosine-3'-phosphate
  modified_base 19: mod_base = OTHER; note = 2'-O-methylcytidine-3'-phosphate
  modified_base 20: mod_base = OTHER; note = 2'-O-methyladenosine-3'-phosphate
  modified_base 21: mod_base = OTHER; note = 2'-O-methyluridine-3'-phosphate N-[tris(GalNAc-alkyl)-amidodecanoyl)]-4-hydroxyprolinol (Hyp-(GalNAc-alkyl)3)
gaaactgcaactagactgcat

SEQ ID NO: 7150 - RNA, 21 nt, synthetic construct
  source 1..21: mol_type = other RNA
  modified_base 1: mod_base = OTHER; note = 2'-O-methyladenosine-3'-phosphorothioate
  modified_base 2: mod_base = OTHER; note = 2'-O-methyladenosine-3'-phosphorothioate
  modified_base 3: mod_base = OTHER; note = 2'-O-methylcytidine-3'-phosphate
  modified_base 4: mod_base = OTHER; note = 2'-O-methyluridine-3'-phosphate
  modified_base 5: mod_base = OTHER; note = 2'-O-methylguanosine-3'-phosphate
  modified_base 6: mod_base = OTHER; note = 2'-O-methylcytidine-3'-phosphate
  modified_base 7: mod_base = OTHER; note = 2'-fluoroadenosine-3'-phosphate
  modified_base 8: mod_base = OTHER; note = 2'-O-methyladenosine-3'-phosphate
  modified_base 9: mod_base = OTHER; note = 2'-fluorocytidine-3'-phosphate
  modified_base 10: mod_base = OTHER; note = 2'-fluorouridine-3'-phosphate
  modified_base 11: mod_base = OTHER; note = 2'-fluoroadenosine-3'-phosphate
  modified_base 12: mod_base = OTHER; note = 2'-O-methylguanosine-3'-phosphate
  modified_base 13: mod_base = OTHER; note = 2'-O-methyladenosine-3'-phosphate
  modified_base 14: mod_base = OTHER; note = 2'-O-methylcytidine-3'-phosphate
  modified_base 15: mod_base = OTHER; note = 2'-O-methyluridine-3'-phosphate
  modified_base 16: mod_base = OTHER; note = 2'-O-methylguanosine-3'-phosphate
  modified_base 17: mod_base = OTHER; note = 2'-O-methylcytidine-3'-phosphate
  modified_base 18: mod_base = OTHER; note = 2'-O-methyladenosine-3'-phosphate
  modified_base 19: mod_base = OTHER; note = 2'-O-methylguanosine-3'-phosphate
  modified_base 20: mod_base = OTHER; note = 2'-O-methyladenosine-3'-phosphate
  modified_base 21: mod_base = OTHER; note = 2'-O-methyluridine-3'-phosphate N-[tris(GalNAc-alkyl)-amidodecanoyl)]-4-hydroxyprolinol (Hyp-(GalNAc-alkyl)3)
aactgcaactagactgcagat

SEQ ID NO: 7151 - RNA, 21 nt, synthetic construct
  source 1..21: mol_type = other RNA
  modified_base 1: mod_base = OTHER; note = 2'-O-methylguanosine-3'-phosphorothioate
  modified_base 2: mod_base = OTHER; note = 2'-O-methylcytidine-3'-phosphorothioate
  modified_base 3: mod_base = OTHER; note = 2'-O-methyladenosine-3'-phosphate
  modified_base 4: mod_base = OTHER; note = 2'-O-methyladenosine-3'-phosphate
  modified_base 5: mod_base = OTHER; note = 2'-O-methylcytidine-3'-phosphate
  modified_base 6: mod_base = OTHER; note = 2'-O-methyladenosine-3'-phosphate
  modified_base 7: mod_base = OTHER; note = 2'-fluoroguanosine-3'-phosphate
  modified_base 8: mod_base = OTHER; note = 2'-O-methylcytidine-3'-phosphate
  modified_base 9: mod_base = OTHER; note = 2'-fluoroadenosine-3'-phosphate
  modified_base 10: mod_base = OTHER; note = 2'-fluorocytidine-3'-phosphate
  modified_base 11: mod_base = OTHER; note = 2'-fluoroadenosine-3'-phosphate
  modified_base 12: mod_base = OTHER; note = 2'-O-methylguanosine-3'-phosphate
  modified_base 13: mod_base = OTHER; note = 2'-O-methyluridine-3'-phosphate
  modified_base 14: mod_base = OTHER; note = 2'-O-methyluridine-3'-phosphate
  modified_base 15: mod_base = OTHER; note = 2'-O-methyladenosine-3'-phosphate
  modified_base 16: mod_base = OTHER; note = 2'-O-methylcytidine-3'-phosphate
  modified_base 17: mod_base = OTHER; note = 2'-O-methyluridine-3'-phosphate
  modified_base 18: mod_base = OTHER; note = 2'-O-methylguanosine-3'-phosphate
  modified_base 19: mod_base = OTHER; note = 2'-O-methylguanosine-3'-phosphate
  modified_base 20: mod_base = OTHER; note = 2'-O-methyladenosine-3'-phosphate
  modified_base 21: mod_base = OTHER; note = 2'-O-methyluridine-3'-phosphate N-[tris(GalNAc-alkyl)-amidodecanoyl)]-4-hydroxyprolinol (Hyp-(GalNAc-alkyl)3)
gcaacagcacagttactggat

SEQ ID NO: 7152 - RNA, 21 nt, synthetic construct
  source 1..21: mol_type = other RNA
  modified_base 1: mod_base = OTHER; note = 2'-O-methyladenosine-3'-phosphorothioate
  modified_base 2: mod_base = OTHER; note = 2'-O-methyladenosine-3'-phosphorothioate
  modified_base 3: mod_base = OTHER; note = 2'-O-methylcytidine-3'-phosphate
  modified_base 4: mod_base = OTHER; note = 2'-O-methyladenosine-3'-phosphate
  modified_base 5: mod_base = OTHER; note = 2'-O-methylguanosine-3'-phosphate
  modified_base 6: mod_base = OTHER; note = 2'-O-methylcytidine-3'-phosphate
  modified_base 7: mod_base = OTHER; note = 2'-fluoroadenosine-3'-phosphate
  modified_base 8: mod_base = OTHER; note = 2'-O-methylcytidine-3'-phosphate
  modified_base 9: mod_base = OTHER; note = 2'-fluoroadenosine-3'-phosphate
  modified_base 10: mod_base = OTHER; note = 2'-fluoroguanosine-3'-phosphate
  modified_base 11: mod_base = OTHER; note = 2'-fluorouridine-3'-phosphate
  modified_base 12: mod_base = OTHER; note = 2'-O-methyluridine-3'-phosphate
  modified_base 13: mod_base = OTHER; note = 2'-O-methyladenosine-3'-phosphate
  modified_base 14: mod_base = OTHER; note = 2'-O-methylcytidine-3'-phosphate
  modified_base 15: mod_base = OTHER; note = 2'-O-methyluridine-3'-phosphate
  modified_base 16: mod_base = OTHER; note = 2'-O-methylguanosine-3'-phosphate
  modified_base 17: mod_base = OTHER; note = 2'-O-methylguanosine-3'-phosphate
  modified_base 18: mod_base = OTHER; note = 2'-O-methyladenosine-3'-phosphate
  modified_base 19: mod_base = OTHER; note = 2'-O-methylcytidine-3'-phosphate
  modified_base 20: mod_base = OTHER; note = 2'-O-methyladenosine-3'-phosphate
  modified_base 21: mod_base = OTHER; note = 2'-O-methyluridine-3'-phosphate N-[tris(GalNAc-alkyl)-amidodecanoyl)]-4-hydroxyprolinol (Hyp-(GalNAc-alkyl)3)
aacagcacagttactggacat

SEQ ID NO: 7153 - RNA, 21 nt, synthetic construct
  source 1..21: mol_type = other RNA
  modified_base 1: mod_base = OTHER; note = 2'-O-methyladenosine-3'-phosphorothioate
  modified_base 2: mod_base = OTHER; note = 2'-O-methylguanosine-3'-phosphorothioate
  modified_base 3: mod_base = OTHER; note = 2'-O-methylcytidine-3'-phosphate
  modified_base 4: mod_base = OTHER; note = 2'-O-methyladenosine-3'-phosphate
  modified_base 5: mod_base = OTHER; note = 2'-O-methylcytidine-3'-phosphate
  modified_base 6: mod_base = OTHER; note = 2'-O-methyladenosine-3'-phosphate
  modified_base 7: mod_base = OTHER; note = 2'-fluoroguanosine-3'-phosphate
  modified_base 8: mod_base = OTHER; note = 2'-O-methyluridine-3'-phosphate
  modified_base 9: mod_base = OTHER; note = 2'-fluorouridine-3'-phosphate
  modified_base 10: mod_base = OTHER; note = 2'-fluoroadenosine-3'-phosphate
  modified_base 11: mod_base = OTHER; note = 2'-fluorocytidine-3'-phosphate
  modified_base 12: mod_base = OTHER; note = 2'-O-methyluridine-3'-phosphate
  modified_base 13: mod_base = OTHER; note = 2'-O-methylguanosine-3'-phosphate
  modified_base 14: mod_base = OTHER; note = 2'-O-methylguanosine-3'-phosphate
  modified_base 15: mod_base = OTHER; note = 2'-O-methyladenosine-3'-phosphate
  modified_base 16: mod_base = OTHER; note = 2'-O-methylcytidine-3'-phosphate
  modified_base 17: mod_base = OTHER; note = 2'-O-methyladenosine-3'-phosphate
  modified_base 18: mod_base = OTHER; note = 2'-O-methyladenosine-3'-phosphate
  modified_base 19: mod_base = OTHER; note = 2'-O-methylcytidine-3'-phosphate
  modified_base 20: mod_base = OTHER; note = 2'-O-methylcytidine-3'-phosphate
  modified_base 21: mod_base = OTHER; note = 2'-O-methyluridine-3'-phosphate N-[tris(GalNAc-alkyl)-amidodecanoyl)]-4-hydroxyprolinol (Hyp-(GalNAc-alkyl)3)
agcacagttactggacaacct

SEQ ID NO: 7154 - RNA, 21 nt, synthetic construct
  source 1..21: mol_type = other RNA
  modified_base 1: mod_base = OTHER; note = 2'-O-methyluridine-3'-phosphorothioate
  modified_base 2: mod_base = OTHER; note = 2'-O-methyluridine-3'-phosphorothioate
  modified_base 3: mod_base = OTHER; note = 2'-O-methylguanosine-3'-phosphate
  modified_base 4: mod_base = OTHER; note = 2'-O-methylguanosine-3'-phosphate
  modified_base 5: mod_base = OTHER; note = 2'-O-methyladenosine-3'-phosphate
  modified_base 6: mod_base = OTHER; note = 2'-O-methylcytidine-3'-phosphate
  modified_base 7: mod_base = OTHER; note = 2'-fluoroadenosine-3'-phosphate
  modified_base 8: mod_base = OTHER; note = 2'-O-methylcytidine-3'-phosphate
  modified_base 9: mod_base = OTHER; note = 2'-fluoroadenosine-3'-phosphate
  modified_base 10: mod_base = OTHER; note = 2'-fluoroguanosine-3'-phosphate
  modified_base 11: mod_base = OTHER; note = 2'-fluorocytidine-3'-phosphate
  modified_base 12: mod_base = OTHER; note = 2'-O-methyladenosine-3'-phosphate
  modified_base 13: mod_base = OTHER; note = 2'-O-methylguanosine-3'-phosphate
  modified_base 14: mod_base = OTHER; note = 2'-O-methylguanosine-3'-phosphate
  modified_base 15: mod_base = OTHER; note = 2'-O-methyladenosine-3'-phosphate
  modified_base 16: mod_base = OTHER; note = 2'-O-methylcytidine-3'-phosphate
  modified_base 17: mod_base = OTHER; note = 2'-O-methyladenosine-3'-phosphate
  modified_base 18: mod_base = OTHER; note = 2'-O-methylcytidine-3'-phosphate
  modified_base 19: mod_base = OTHER; note = 2'-O-methylcytidine-3'-phosphate
  modified_base 20: mod_base = OTHER; note = 2'-O-methyladenosine-3'-phosphate
  modified_base 21: mod_base = OTHER; note = 2'-O-methyluridine-3'-phosphate N-[tris(GalNAc-alkyl)-amidodecanoyl)]-4-hydroxyprolinol (Hyp-(GalNAc-alkyl)3)
ttggacacagcaggacaccat

SEQ ID NO: 7155 - RNA, 21 nt, synthetic construct
  source 1..21: mol_type = other RNA
  modified_base 1: mod_base = OTHER; note = 2'-O-methylguanosine-3'-phosphorothioate
  modified_base 2: mod_base = OTHER; note = 2'-O-methylguanosine-3'-phosphorothioate
  modified_base 3: mod_base = OTHER; note = 2'-O-methyladenosine-3'-phosphate
  modified_base 4: mod_base = OTHER; note = 2'-O-methylcytidine-3'-phosphate
  modified_base 5: mod_base = OTHER; note = 2'-O-methyladenosine-3'-phosphate
  modified_base 6: mod_base = OTHER; note = 2'-O-methylcytidine-3'-phosphate
  modified_base 7: mod_base = OTHER; note = 2'-fluoroadenosine-3'-phosphate
  modified_base 8: mod_base = OTHER; note = 2'-O-methylguanosine-3'-phosphate
  modified_base 9: mod_base = OTHER; note = 2'-fluorocytidine-3'-phosphate
  modified_base 10: mod_base = OTHER; note = 2'-fluoroadenosine-3'-phosphate
  modified_base 11: mod_base = OTHER; note = 2'-fluoroguanosine-3'-phosphate
  modified_base 12: mod_base = OTHER; note = 2'-O-methylguanosine-3'-phosphate
  modified_base 13: mod_base = OTHER; note = 2'-O-methyladenosine-3'-phosphate
  modified_base 14: mod_base = OTHER; note = 2'-O-methylcytidine-3'-phosphate
  modified_base 15: mod_base = OTHER; note = 2'-O-methyladenosine-3'-phosphate
  modified_base 16: mod_base = OTHER; note = 2'-O-methylcytidine-3'-phosphate
  modified_base 17: mod_base = OTHER; note = 2'-O-methylcytidine-3'-phosphate
  modified_base 18: mod_base = OTHER; note = 2'-O-methyladenosine-3'-phosphate
  modified_base 19: mod_base = OTHER; note = 2'-O-methylguanosine-3'-phosphate
  modified_base 20: mod_base = OTHER; note = 2'-O-methylcytidine-3'-phosphate
  modified_base 21: mod_base = OTHER; note = 2'-O-methyluridine-3'-phosphate N-[tris(GalNAc-alkyl)-amidodecanoyl)]-4-hydroxyprolinol (Hyp-(GalNAc-alkyl)3)
ggacacagcaggacaccagct

SEQ ID NO: 7156 - RNA, 21 nt, synthetic construct
  source 1..21: mol_type = other RNA
  modified_base 1: mod_base = OTHER; note = 2'-O-methylcytidine-3'-phosphorothioate
  modified_base 2: mod_base = OTHER; note = 2'-O-methyladenosine-3'-phosphorothioate
  modified_base 3: mod_base = OTHER; note = 2'-O-methylcytidine-3'-phosphate
  modified_base 4: mod_base = OTHER; note = 2'-O-methyladenosine-3'-phosphate
  modified_base 5: mod_base = OTHER; note = 2'-O-methylguanosine-3'-phosphate
  modified_base 6: mod_base = OTHER; note = 2'-O-methylcytidine-3'-phosphate
  modified_base 7: mod_base = OTHER; note = 2'-fluoroadenosine-3'-phosphate
  modified_base 8: mod_base = OTHER; note = 2'-O-methylguanosine-3'-phosphate
  modified_base 9: mod_base = OTHER; note = 2'-fluoroguanosine-3'-phosphate
  modified_base 10: mod_base = OTHER; note = 2'-fluoroadenosine-3'-phosphate
  modified_base 11: mod_base = OTHER; note = 2'-fluorocytidine-3'-phosphate
  modified_base 12: mod_base = OTHER; note = 2'-O-methyladenosine-3'-phosphate
  modified_base 13: mod_base = OTHER; note = 2'-O-methylcytidine-3'-phosphate
  modified_base 14: mod_base = OTHER; note = 2'-O-methylcytidine-3'-phosphate
  modified_base 15: mod_base = OTHER; note = 2'-O-methyladenosine-3'-phosphate
  modified_base 16: mod_base = OTHER; note = 2'-O-methylguanosine-3'-phosphate
  modified_base 17: mod_base = OTHER; note = 2'-O-methylcytidine-3'-phosphate
  modified_base 18: mod_base = OTHER; note = 2'-O-methyladenosine-3'-phosphate
  modified_base 19: mod_base = OTHER; note = 2'-O-methylguanosine-3'-phosphate
  modified_base 20: mod_base = OTHER; note = 2'-O-methylcytidine-3'-phosphate
  modified_base 21: mod_base = OTHER; note = 2'-O-methyluridine-3'-phosphate N-[tris(GalNAc-alkyl)-amidodecanoyl)]-4-hydroxyprolinol (Hyp-(GalNAc-alkyl)3)
cacagcaggacaccagcagct

SEQ ID NO: 7157 - RNA, 21 nt, synthetic construct
  source 1..21: mol_type = other RNA
  modified_base 1: mod_base = OTHER; note = 2'-O-methylcytidine-3'-phosphorothioate
  modified_base 2: mod_base = OTHER; note = 2'-O-methylcytidine-3'-phosphorothioate
  modified_base 3: mod_base = OTHER; note = 2'-O-methyladenosine-3'-phosphate
  modified_base 4: mod_base = OTHER; note = 2'-O-methylguanosine-3'-phosphate
  modified_base 5: mod_base = OTHER; note = 2'-O-methylcytidine-3'-phosphate
  modified_base 6: mod_base = OTHER; note = 2'-O-methyladenosine-3'-phosphate
  modified_base 7: mod_base = OTHER; note = 2'-fluoroguanosine-3'-phosphate
  modified_base 8: mod_base = OTHER; note = 2'-O-methylcytidine-3'-phosphate
  modified_base 9: mod_base = OTHER; note = 2'-fluorocytidine-3'-phosphate
  modified_base 10: mod_base = OTHER; note = 2'-fluorocytidine-3'-phosphate
  modified_base 11: mod_base = OTHER; note = 2'-fluorouridine-3'-phosphate
  modified_base 12: mod_base = OTHER; note = 2'-O-methyluridine-3'-phosphate
  modified_base 13: mod_base = OTHER; note = 2'-O-methylcytidine-3'-phosphate
  modified_base 14: mod_base = OTHER; note = 2'-O-methylcytidine-3'-phosphate
  modified_base 15: mod_base = OTHER; note = 2'-O-methyluridine-3'-phosphate
  modified_base 16: mod_base = OTHER; note = 2'-O-methyladenosine-3'-phosphate
  modified_base 17: mod_base = OTHER; note = 2'-O-methylguanosine-3'-phosphate
  modified_base 18: mod_base = OTHER; note = 2'-O-methyladenosine-3'-phosphate
  modified_base 19: mod_base = OTHER; note = 2'-O-methylguanosine-3'-phosphate
  modified_base 20: mod_base = OTHER; note = 2'-O-methylcytidine-3'-phosphate
  modified_base 21: mod_base = OTHER; note = 2'-O-methyluridine-3'-phosphate N-[tris(GalNAc-alkyl)-amidodecanoyl)]-4-hydroxyprolinol (Hyp-(GalNAc-alkyl)3)
ccagcagcccttcctagagct

SEQ ID NO: 7158 - RNA, 21 nt, synthetic construct
  source 1..21: mol_type = other RNA
  modified_base 1: mod_base = OTHER; note = 2'-O-methylcytidine-3'-phosphorothioate
  modified_base 2: mod_base = OTHER; note = 2'-O-methyladenosine-3'-phosphorothioate
  modified_base 3: mod_base = OTHER; note = 2'-O-methylguanosine-3'-phosphate
  modified_base 4: mod_base = OTHER; note = 2'-O-methylcytidine-3'-phosphate
  modified_base 5: mod_base = OTHER; note = 2'-O-methyladenosine-3'-phosphate
  modified_base 6: mod_base = OTHER; note = 2'-O-methylguanosine-3'-phosphate
  modified_base 7: mod_base = OTHER; note = 2'-fluorocytidine-3'-phosphate
  modified_base 8: mod_base = OTHER; note = 2'-O-methylcytidine-3'-phosphate
  modified_base 9: mod_base = OTHER; note = 2'-fluorocytidine-3'-phosphate
  modified_base 10: mod_base = OTHER; note = 2'-fluorouridine-3'-phosphate
  modified_base 11: mod_base = OTHER; note = 2'-fluorouridine-3'-phosphate
  modified_base 12: mod_base = OTHER; note = 2'-O-methylcytidine-3'-phosphate
  modified_base 13: mod_base = OTHER; note = 2'-O-methylcytidine-3'-phosphate
  modified_base 14: mod_base = OTHER; note = 2'-O-methyluridine-3'-phosphate
  modified_base 15: mod_base = OTHER; note = 2'-O-methyladenosine-3'-phosphate
  modified_base 16: mod_base = OTHER; note = 2'-O-methylguanosine-3'-phosphate
  modified_base 17: mod_base = OTHER; note = 2'-O-methyladenosine-3'-phosphate
  modified_base 18: mod_base = OTHER; note = 2'-O-methylguanosine-3'-phosphate
  modified_base 19: mod_base = OTHER; note = 2'-O-methylcytidine-3'-phosphate
  modified_base 20: mod_base = OTHER; note = 2'-O-methyluridine-3'-phosphate
  modified_base 21: mod_base = OTHER; note = 2'-O-methyluridine-3'-phosphate N-[tris(GalNAc-alkyl)-amidodecanoyl)]-4-hydroxyprolinol (Hyp-(GalNAc-alkyl)3)
cagcagcccttcctagagctt

SEQ ID NO: 7159 - RNA, 21 nt, synthetic construct
  source 1..21: mol_type = other RNA
  modified_base 1: mod_base = OTHER; note = 2'-O-methylguanosine-3'-phosphorothioate
  modified_base 2: mod_base = OTHER; note = 2'-O-methylcytidine-3'-phosphorothioate
  modified_base 3: mod_base = OTHER; note = 2'-O-methyladenosine-3'-phosphate
  modified_base 4: mod_base = OTHER; note = 2'-O-methylguanosine-3'-phosphate
  modified_base 5: mod_base = OTHER; note = 2'-O-methylcytidine-3'-phosphate
  modified_base 6: mod_base = OTHER; note = 2'-O-methylcytidine-3'-phosphate
  modified_base 7: mod_base = OTHER; note = 2'-fluorocytidine-3'-phosphate
  modified_base 8: mod_base = OTHER; note = 2'-O-methyluridine-3'-phosphate
  modified_base 9: mod_base = OTHER; note = 2'-fluorouridine-3'-phosphate
  modified_base 10: mod_base = OTHER; note = 2'-fluorocytidine-3'-phosphate
  modified_base 11: mod_base = OTHER; note = 2'-fluorocytidine-3'-phosphate
  modified_base 12: mod_base = OTHER; note = 2'-O-methyluridine-3'-phosphate
  modified_base 13: mod_base = OTHER; note = 2'-O-methyladenosine-3'-phosphate
  modified_base 14: mod_base = OTHER; note = 2'-O-methylguanosine-3'-phosphate
  modified_base 15: mod_base = OTHER; note = 2'-O-methyladenosine-3'-phosphate
  modified_base 16: mod_base = OTHER; note = 2'-O-methylguanosine-3'-phosphate
  modified_base 17: mod_base = OTHER; note = 2'-O-methylcytidine-3'-phosphate
  modified_base 18: mod_base = OTHER; note = 2'-O-methyluridine-3'-phosphate
  modified_base 19: mod_base = OTHER; note = 2'-O-methyluridine-3'-phosphate
  modified_base 20: mod_base = OTHER; note = 2'-O-methyladenosine-3'-phosphate
  modified_base 21: mod_base = OTHER; note = 2'-O-methyluridine-3'-phosphate N-[tris(GalNAc-alkyl)-amidodecanoyl)]-4-hydroxyprolinol (Hyp-(GalNAc-alkyl)3)
gcagcccttcctagagcttat

SEQ ID NO: 7160 - RNA, 21 nt, synthetic construct
  source 1..21: mol_type = other RNA
  modified_base 1: mod_base = OTHER; note = 2'-O-methyluridine-3'-phosphorothioate
  modified_base 2: mod_base = OTHER; note = 2'-O-methyluridine-3'-phosphorothioate
  modified_base 3: mod_base = OTHER; note = 2'-O-methyladenosine-3'-phosphate
  modified_base 4: mod_base = OTHER; note = 2'-O-methylcytidine-3'-phosphate
  modified_base 5: mod_base = OTHER; note = 2'-O-methylguanosine-3'-phosphate
  modified_base 6: mod_base = OTHER; note = 2'-O-methyluridine-3'-phosphate
  modified_base 7: mod_base = OTHER; note = 2'-fluoroadenosine-3'-phosphate
  modified_base 8: mod_base = OTHER; note = 2'-O-methylguanosine-3'-phosphate
  modified_base 9: mod_base = OTHER; note = 2'-fluoroadenosine-3'-phosphate
  modified_base 10: mod_base = OTHER; note = 2'-fluorocytidine-3'-phosphate
  modified_base 11: mod_base = OTHER; note = 2'-fluorouridine-3'-phosphate
  modified_base 12: mod_base = OTHER; note = 2'-O-methyluridine-3'-phosphate
  modified_base 13: mod_base = OTHER; note = 2'-O-methylcytidine-3'-phosphate
  modified_base 14: mod_base = OTHER; note = 2'-O-methylcytidine-3'-phosphate
  modified_base 15: mod_base = OTHER; note = 2'-O-methyladenosine-3'-phosphate
  modified_base 16: mod_base = OTHER; note = 2'-O-methylguanosine-3'-phosphate
  modified_base 17: mod_base = OTHER; note = 2'-O-methylguanosine-3'-phosphate
  modified_base 18: mod_base = OTHER; note = 2'-O-methyladenosine-3'-phosphate
  modified_base 19: mod_base = OTHER; note = 2'-O-methyladenosine-3'-phosphate
  modified_base 20: mod_base = OTHER; note = 2'-O-methylcytidine-3'-phosphate
  modified_base 21: mod_base = OTHER; note = 2'-O-methyluridine-3'-phosphate N-[tris(GalNAc-alkyl)-amidodecanoyl)]-4-hydroxyprolinol (Hyp-(GalNAc-alkyl)3)
ttacgtagacttccaggaact

SEQ ID NO: 7161 - RNA, 21 nt, synthetic construct
  source 1..21: mol_type = other RNA
  modified_base 1: mod_base = OTHER; note = 2'-O-methyladenosine-3'-phosphorothioate
  modified_base 2: mod_base = OTHER; note = 2'-O-methylguanosine-3'-phosphorothioate
  modified_base 3: mod_base = OTHER; note = 2'-O-methyladenosine-3'-phosphate
  modified_base 4: mod_base = OTHER; note = 2'-O-methylcytidine-3'-phosphate
  modified_base 5: mod_base = OTHER; note = 2'-O-methyluridine-3'-phosphate
  modified_base 6: mod_base = OTHER; note = 2'-O-methyluridine-3'-phosphate
  modified_base 7: mod_base = OTHER; note = 2'-fluorocytidine-3'-phosphate
  modified_base 8: mod_base = OTHER; note = 2'-O-methylcytidine-3'-phosphate
  modified_base 9: mod_base = OTHER; note = 2'-fluoroadenosine-3'-phosphate
  modified_base 10: mod_base = OTHER; note = 2'-fluoroguanosine-3'-phosphate
  modified_base 11: mod_base = OTHER; note = 2'-fluoroguanosine-3'-phosphate
  modified_base 12: mod_base = OTHER; note = 2'-O-methyladenosine-3'-phosphate
  modified_base 13: mod_base = OTHER; note = 2'-O-methyladenosine-3'-phosphate
  modified_base 14: mod_base = OTHER; note = 2'-O-methylcytidine-3'-phosphate
  modified_base 15: mod_base = OTHER; note = 2'-O-methyluridine-3'-phosphate
  modified_base 16: mod_base = OTHER; note = 2'-O-methylguanosine-3'-phosphate
  modified_base 17: mod_base = OTHER; note = 2'-O-methylguanosine-3'-phosphate
  modified_base 18: mod_base = OTHER; note = 2'-O-methylguanosine-3'-phosphate
  modified_base 19: mod_base = OTHER; note = 2'-O-methyladenosine-3'-phosphate
  modified_base 20: mod_base = OTHER; note = 2'-O-methyluridine-3'-phosphate
  modified_base 21: mod_base = OTHER; note = 2'-O-methyluridine-3'-phosphate N-[tris(GalNAc-alkyl)-amidodecanoyl)]-4-hydroxyprolinol (Hyp-(GalNAc-alkyl)3)
agacttccaggaactgggatt

SEQ ID NO: 7162 - RNA, 21 nt, synthetic construct
  source 1..21: mol_type = other RNA
  modified_base 1: mod_base = OTHER; note = 2'-O-methylguanosine-3'-phosphorothioate
  modified_base 2: mod_base = OTHER; note = 2'-O-methyluridine-3'-phosphorothioate
  modified_base 3: mod_base = OTHER; note = 2'-O-methyladenosine-3'-phosphate
  modified_base 4: mod_base = OTHER; note = 2'-O-methylcytidine-3'-phosphate
  modified_base 5: mod_base = OTHER; note = 2'-O-methylcytidine-3'-phosphate
  modified_base 6: mod_base = OTHER; note = 2'-O-methyladenosine-3'-phosphate
  modified_base 7: mod_base = OTHER; note = 2'-fluoroguanosine-3'-phosphate
  modified_base 8: mod_base = OTHER; note = 2'-O-methylcytidine-3'-phosphate
  modified_base 9: mod_base = OTHER; note = 2'-fluorouridine-3'-phosphate
  modified_base 10: mod_base = OTHER; note = 2'-fluoroguanosine-3'-phosphate
  modified_base 11: mod_base = OTHER; note = 2'-fluoroadenosine-3'-phosphate
  modified_base 12: mod_base = OTHER; note = 2'-O-methyladenosine-3'-phosphate
  modified_base 13: mod_base = OTHER; note = 2'-O-methyluridine-3'-phosphate
  modified_base 14: mod_base = OTHER; note = 2'-O-methyluridine-3'-phosphate
  modified_base 15: mod_base = OTHER; note = 2'-O-methyladenosine-3'-phosphate
  modified_base 16: mod_base = OTHER; note = 2'-O-methylcytidine-3'-phosphate
  modified_base 17: mod_base = OTHER; note = 2'-O-methyluridine-3'-phosphate
  modified_base 18: mod_base = OTHER; note = 2'-O-methylguanosine-3'-phosphate
  modified_base 19: mod_base = OTHER; note = 2'-O-methylcytidine-3'-phosphate
  modified_base 20: mod_base = OTHER; note = 2'-O-methyladenosine-3'-phosphate
  modified_base 21: mod_base = OTHER; note = 2'-O-methyluridine-3'-phosphate N-[tris(GalNAc-alkyl)-amidodecanoyl)]-4-hydroxyprolinol (Hyp-(GalNAc-alkyl)3)
gtaccagctgaattactgcat

SEQ ID NO: 7163 - RNA, 21 nt, synthetic construct
  source 1..21: mol_type = other RNA
  modified_base 1: mod_base = OTHER; note = 2'-O-methyladenosine-3'-phosphorothioate
  modified_base 2: mod_base = OTHER; note = 2'-O-methylcytidine-3'-phosphorothioate
  modified_base 3: mod_base = OTHER; note = 2'-O-methylcytidine-3'-phosphate
  modified_base 4: mod_base = OTHER; note = 2'-O-methyladenosine-3'-phosphate
  modified_base 5: mod_base = OTHER; note = 2'-O-methylguanosine-3'-phosphate
  modified_base 6: mod_base = OTHER; note = 2'-O-methylcytidine-3'-phosphate
  modified_base 7: mod_base = OTHER; note = 2'-fluorouridine-3'-phosphate
  modified_base 8: mod_base = OTHER; note = 2'-O-methylguanosine-3'-phosphate
  modified_base 9: mod_base = OTHER; note = 2'-fluoroadenosine-3'-phosphate
  modified_base 10: mod_base = OTHER; note = 2'-fluoroadenosine-3'-phosphate
  modified_base 11: mod_base = OTHER; note = 2'-fluorouridine-3'-phosphate
  modified_base 12: mod_base = OTHER; note = 2'-O-methyluridine-3'-phosphate
  modified_base 13: mod_base = OTHER; note = 2'-O-methyladenosine-3'-phosphate
  modified_base 14: mod_base = OTHER; note = 2'-O-methylcytidine-3'-phosphate
  modified_base 15: mod_base = OTHER; note = 2'-O-methyluridine-3'-phosphate
  modified_base 16: mod_base = OTHER; note = 2'-O-methylguanosine-3'-phosphate
  modified_base 17: mod_base = OTHER; note = 2'-O-methylcytidine-3'-phosphate
  modified_base 18: mod_base = OTHER; note = 2'-O-methyladenosine-3'-phosphate
  modified_base 19: mod_base = OTHER; note = 2'-O-methylguanosine-3'-phosphate
  modified_base 20: mod_base = OTHER; note = 2'-O-methyluridine-3'-phosphate
  modified_base 21: mod_base = OTHER; note = 2'-O-methyluridine-3'-phosphate N-[tris(GalNAc-alkyl)-amidodecanoyl)]-4-hydroxyprolinol (Hyp-(GalNAc-alkyl)3)
accagctgaattactgcagtt

SEQ ID NO: 7164 - RNA, 21 nt, synthetic construct
  source 1..21: mol_type = other RNA
  modified_base 1: mod_base = OTHER; note = 2'-O-methylcytidine-3'-phosphorothioate
  modified_base 2: mod_base = OTHER; note = 2'-O-methyluridine-3'-phosphorothioate
  modified_base 3: mod_base = OTHER; note = 2'-O-methylguanosine-3'-phosphate
  modified_base 4: mod_base = OTHER; note = 2'-O-methyladenosine-3'-phosphate
  modified_base 5: mod_base = OTHER; note = 2'-O-methyladenosine-3'-phosphate
  modified_base 6: mod_base = OTHER; note = 2'-O-methyluridine-3'-phosphate
  modified_base 7: mod_base = OTHER; note = 2'-fluorouridine-3'-phosphate
  modified_base 8: mod_base = OTHER; note = 2'-O-methyladenosine-3'-phosphate
  modified_base 9: mod_base = OTHER; note = 2'-fluorocytidine-3'-phosphate
  modified_base 10: mod_base = OTHER; note = 2'-fluorouridine-3'-phosphate
  modified_base 11: mod_base = OTHER; note = 2'-fluoroguanosine-3'-phosphate
  modified_base 12: mod_base = OTHER; note = 2'-O-methylcytidine-3'-phosphate
  modified_base 13: mod_base = OTHER; note = 2'-O-methyladenosine-3'-phosphate
  modified_base 14: mod_base = OTHER; note = 2'-O-methylguanosine-3'-phosphate
  modified_base 15: mod_base = OTHER; note = 2'-O-methyluridine-3'-phosphate
  modified_base 16: mod_base = OTHER; note = 2'-O-methylguanosine-3'-phosphate
  modified_base 17: mod_base = OTHER; note = 2'-O-methylguanosine-3'-phosphate
  modified_base 18: mod_base = OTHER; note = 2'-O-methylguanosine-3'-phosphate
  modified_base 19: mod_base = OTHER; note = 2'-O-methylcytidine-3'-phosphate
  modified_base 20: mod_base = OTHER; note = 2'-O-methyladenosine-3'-phosphate
  modified_base 21: mod_base = OTHER; note = 2'-O-methyluridine-3'-phosphate N-[tris(GalNAc-alkyl)-amidodecanoyl)]-4-hydroxyprolinol (Hyp-(GalNAc-alkyl)3)
ctgaattactgcagtgggcat

SEQ ID NO: 7165 - RNA, 21 nt, synthetic construct
  source 1..21: mol_type = other RNA
  modified_base 1: mod_base = OTHER; note = 2'-O-methylcytidine-3'-phosphorothioate
  modified_base 2: mod_base = OTHER; note = 2'-O-methyladenosine-3'-phosphorothioate
  modified_base 3: mod_base = OTHER; note = 2'-O-methyluridine-3'-phosphate
  modified_base 4: mod_base = OTHER; note = 2'-O-methyluridine-3'-phosphate
  modified_base 5: mod_base = OTHER; note = 2'-O-methylguanosine-3'-phosphate
  modified_base 6: mod_base = OTHER; note = 2'-O-methylcytidine-3'-phosphate
  modified_base 7: mod_base = OTHER; note = 2'-fluorouridine-3'-phosphate
  modified_base 8: mod_base = OTHER; note = 2'-O-methylguanosine-3'-phosphate
  modified_base 9: mod_base = OTHER; note = 2'-fluorocytidine-3'-phosphate
  modified_base 10: mod_base = OTHER; note = 2'-fluorocytidine-3'-phosphate
  modified_base 11: mod_base = OTHER; note = 2'-fluorouridine-3'-phosphate
  modified_base 12: mod_base = OTHER; note = 2'-O-methylcytidine-3'-phosphate
  modified_base 13: mod_base = OTHER; note = 2'-O-methyluridine-3'-phosphate
  modified_base 14: mod_base = OTHER; note = 2'-O-methyluridine-3'-phosphate
  modified_base 15: mod_base = OTHER; note = 2'-O-methyluridine-3'-phosphate
  modified_base 16: mod_base = OTHER; note = 2'-O-methylcytidine-3'-phosphate
  modified_base 17: mod_base = OTHER; note = 2'-O-methylcytidine-3'-phosphate
  modified_base 18: mod_base = OTHER; note = 2'-O-methyladenosine-3'-phosphate
  modified_base 19: mod_base = OTHER; note = 2'-O-methyluridine-3'-phosphate
  modified_base 20: mod_base = OTHER; note = 2'-O-methyluridine-3'-phosphate
  modified_base 21: mod_base = OTHER; note = 2'-O-methyluridine-3'-phosphate N-[tris(GalNAc-alkyl)-amidodecanoyl)]-4-hydroxyprolinol (Hyp-(GalNAc-alkyl)3)
cattgctgcctctttccattt

SEQ ID NO: 7166 - RNA, 21 nt, synthetic construct
  source 1..21: mol_type = other RNA
  modified_base 1: mod_base = OTHER; note = 2'-O-methylguanosine-3'-phosphorothioate
  modified_base 2: mod_base = OTHER; note = 2'-O-methylcytidine-3'-phosphorothioate
  modified_base 3: mod_base = OTHER; note = 2'-O-methylcytidine-3'-phosphate
  modified_base 4: mod_base = OTHER; note = 2'-O-methyluridine-3'-phosphate
  modified_base 5: mod_base = OTHER; note = 2'-O-methylcytidine-3'-phosphate
  modified_base 6: mod_base = OTHER; note = 2'-O-methyluridine-3'-phosphate
  modified_base 7: mod_base = OTHER; note = 2'-fluorouridine-3'-phosphate
  modified_base 8: mod_base = OTHER; note = 2'-O-methyluridine-3'-phosphate
  modified_base 9: mod_base = OTHER; note = 2'-fluorocytidine-3'-phosphate
  modified_base 10: mod_base = OTHER; note = 2'-fluorocytidine-3'-phosphate
  modified_base 11: mod_base = OTHER; note = 2'-fluoroadenosine-3'-phosphate
  modified_base 12: mod_base = OTHER; note = 2'-O-methyluridine-3'-phosphate
  modified_base 13: mod_base = OTHER; note = 2'-O-methyluridine-3'-phosphate
  modified_base 14: mod_base = OTHER; note = 2'-O-methylcytidine-3'-phosphate
  modified_base 15: mod_base = OTHER; note = 2'-O-methyluridine-3'-phosphate
  modified_base 16: mod_base = OTHER; note = 2'-O-methylguanosine-3'-phosphate
  modified_base 17: mod_base = OTHER; note = 2'-O-methylcytidine-3'-phosphate
  modified_base 18: mod_base = OTHER; note = 2'-O-methylcytidine-3'-phosphate
  modified_base 19: mod_base = OTHER; note = 2'-O-methylguanosine-3'-phosphate
  modified_base 20: mod_base = OTHER; note = 2'-O-methyluridine-3'-phosphate
  modified_base 21: mod_base = OTHER; note = 2'-O-methyluridine-3'-phosphate N-[tris(GalNAc-alkyl)-amidodecanoyl)]-4-hydroxyprolinol (Hyp-(GalNAc-alkyl)3)
gcctctttccattctgccgtt

SEQ ID NO: 7167 - RNA, 21 nt, synthetic construct
  source 1..21: mol_type = other RNA
  modified_base 1: mod_base = OTHER; note = 2'-O-methyluridine-3'-phosphorothioate
  modified_base 2: mod_base = OTHER; note = 2'-O-methylcytidine-3'-phosphorothioate
  modified_base 3: mod_base = OTHER; note = 2'-O-methylcytidine-3'-phosphate
  modified_base 4: mod_base = OTHER; note = 2'-O-methyladenosine-3'-phosphate
  modified_base 5: mod_base = OTHER; note = 2'-O-methyluridine-3'-phosphate
  modified_base 6: mod_base = OTHER; note = 2'-O-methyluridine-3'-phosphate
  modified_base 7: mod_base = OTHER; note = 2'-fluorocytidine-3'-phosphate
  modified_base 8: mod_base = OTHER; note = 2'-O-methyluridine-3'-phosphate
  modified_base 9: mod_base = OTHER; note = 2'-fluoroguanosine-3'-phosphate
  modified_base 10: mod_base = OTHER; note = 2'-fluorocytidine-3'-phosphate
  modified_base 11: mod_base = OTHER; note = 2'-fluorocytidine-3'-phosphate
  modified_base 12: mod_base = OTHER; note = 2'-O-methylguanosine-3'-phosphate
  modified_base 13: mod_base = OTHER; note = 2'-O-methyluridine-3'-phosphate
  modified_base 14: mod_base = OTHER; note = 2'-O-methylcytidine-3'-phosphate
  modified_base 15: mod_base = OTHER; note = 2'-O-methyluridine-3'-phosphate
  modified_base 16: mod_base = OTHER; note = 2'-O-methyluridine-3'-phosphate
  modified_base 17: mod_base = OTHER; note = 2'-O-methylcytidine-3'-phosphate
  modified_base 18: mod_base = OTHER; note = 2'-O-methyladenosine-3'-phosphate
  modified_base 19: mod_base = OTHER; note = 2'-O-methylguanosine-3'-phosphate
  modified_base 20: mod_base = OTHER; note = 2'-O-methylcytidine-3'-phosphate
  modified_base 21: mod_base = OTHER; note = 2'-O-methyluridine-3'-phosphate N-[tris(GalNAc-alkyl)-amidodecanoyl)]-4-hydroxyprolinol (Hyp-(GalNAc-alkyl)3)
tccattctgccgtcttcagct

SEQ ID NO: 7168 - RNA, 21 nt, synthetic construct
  source 1..21: mol_type = other RNA
  modified_base 1: mod_base = OTHER; note = 2'-O-methylcytidine-3'-phosphorothioate
  modified_base 2: mod_base = OTHER; note = 2'-O-methylcytidine-3'-phosphorothioate
  modified_base 3: mod_base = OTHER; note = 2'-O-methyladenosine-3'-phosphate
  modified_base 4: mod_base = OTHER; note = 2'-O-methyluridine-3'-phosphate
  modified_base 5: mod_base = OTHER; note = 2'-O-methyluridine-3'-phosphate
  modified_base 6: mod_base = OTHER; note = 2'-O-methylcytidine-3'-phosphate
  modified_base 7: mod_base = OTHER; note = 2'-fluorouridine-3'-phosphate
  modified_base 8: mod_base = OTHER; note = 2'-O-methylguanosine-3'-phosphate
  modified_base 9: mod_base = OTHER; note = 2'-fluorocytidine-3'-phosphate
  modified_base 10: mod_base = OTHER; note = 2'-fluorocytidine-3'-phosphate
  modified_base 11: mod_base = OTHER; note = 2'-fluoroguanosine-3'-phosphate
  modified_base 12: mod_base = OTHER; note = 2'-O-methyluridine-3'-phosphate
  modified_base 13: mod_base = OTHER; note = 2'-O-methylcytidine-3'-phosphate
  modified_base 14: mod_base = OTHER; note = 2'-O-methyluridine-3'-phosphate
  modified_base 15: mod_base = OTHER; note = 2'-O-methyluridine-3'-phosphate
  modified_base 16: mod_base = OTHER; note = 2'-O-methylcytidine-3'-phosphate
  modified_base 17: mod_base = OTHER; note = 2'-O-methyladenosine-3'-phosphate
  modified_base 18: mod_base = OTHER; note = 2'-O-methylguanosine-3'-phosphate
  modified_base 19: mod_base = OTHER; note = 2'-O-methylcytidine-3'-phosphate
  modified_base 20: mod_base = OTHER; note = 2'-O-methylcytidine-3'-phosphate
  modified_base 21: mod_base = OTHER; note = 2'-O-methyluridine-3'-phosphate N-[tris(GalNAc-alkyl)-amidodecanoyl)]-4-hydroxyprolinol (Hyp-(GalNAc-alkyl)3)
ccattctgccgtcttcagcct

SEQ ID NO: 7169 - RNA, 21 nt, synthetic construct
  source 1..21: mol_type = other RNA
  modified_base 1: mod_base = OTHER; note = 2'-O-methyluridine-3'-phosphorothioate
  modified_base 2: mod_base = OTHER; note = 2'-O-methylcytidine-3'-phosphorothioate
  modified_base 3: mod_base = OTHER; note = 2'-O-methyluridine-3'-phosphate
  modified_base 4: mod_base = OTHER; note = 2'-O-methyluridine-3'-phosphate
  modified_base 5: mod_base = OTHER; note = 2'-O-methylcytidine-3'-phosphate
  modified_base 6: mod_base = OTHER; note = 2'-O-methyladenosine-3'-phosphate
  modified_base 7: mod_base = OTHER; note = 2'-fluoroguanosine-3'-phosphate
  modified_base 8: mod_base = OTHER; note = 2'-O-methylcytidine-3'-phosphate
  modified_base 9: mod_base = OTHER; note = 2'-fluorocytidine-3'-phosphate
  modified_base 10: mod_base = OTHER; note = 2'-fluorouridine-3'-phosphate
  modified_base 11: mod_base = OTHER; note = 2'-fluorocytidine-3'-phosphate
  modified_base 12: mod_base = OTHER; note = 2'-O-methylcytidine-3'-phosphate
  modified_base 13: mod_base = OTHER; note = 2'-O-methyluridine-3'-phosphate
  modified_base 14: mod_base = OTHER; note = 2'-O-methylcytidine-3'-phosphate
  modified_base 15: mod_base = OTHER; note = 2'-O-methyladenosine-3'-phosphate
  modified_base 16: mod_base = OTHER; note = 2'-O-methyladenosine-3'-phosphate
  modified_base 17: mod_base = OTHER; note = 2'-O-methyladenosine-3'-phosphate
  modified_base 18: mod_base = OTHER; note = 2'-O-methylguanosine-3'-phosphate
  modified_base 19: mod_base = OTHER; note = 2'-O-methylcytidine-3'-phosphate
  modified_base 20: mod_base = OTHER; note = 2'-O-methylcytidine-3'-phosphate
  modified_base 21: mod_base = OTHER; note = 2'-O-methyluridine-3'-phosphate N-[tris(GalNAc-alkyl)-amidodecanoyl)]-4-hydroxyprolinol (Hyp-(GalNAc-alkyl)3)
tcttcagcctcctcaaagcct

SEQ ID NO: 7170 - RNA, 21 nt, synthetic construct
  source 1..21: mol_type = other RNA
  modified_base 1: mod_base = OTHER; note = 2'-O-methylcytidine-3'-phosphorothioate
  modified_base 2: mod_base = OTHER; note = 2'-O-methyluridine-3'-phosphorothioate
  modified_base 3: mod_base = OTHER; note = 2'-O-methyluridine-3'-phosphate
  modified_base 4: mod_base = OTHER; note = 2'-O-methylcytidine-3'-phosphate
  modified_base 5: mod_base = OTHER; note = 2'-O-methyladenosine-3'-phosphate
  modified_base 6: mod_base = OTHER; note = 2'-O-methylguanosine-3'-phosphate
  modified_base 7: mod_base = OTHER; note = 2'-fluorocytidine-3'-phosphate
  modified_base 8: mod_base = OTHER; note = 2'-O-methylcytidine-3'-phosphate
  modified_base 9: mod_base = OTHER; note = 2'-fluorouridine-3'-phosphate
  modified_base 10: mod_base = OTHER; note = 2'-fluorocytidine-3'-phosphate
  modified_base 11: mod_base = OTHER; note = 2'-fluorocytidine-3'-phosphate
  modified_base 12: mod_base = OTHER; note = 2'-O-methyluridine-3'-phosphate
  modified_base 13: mod_base = OTHER; note = 2'-O-methylcytidine-3'-phosphate
  modified_base 14: mod_base = OTHER; note = 2'-O-methyladenosine-3'-phosphate
  modified_base 15: mod_base = OTHER; note = 2'-O-methyladenosine-3'-phosphate
  modified_base 16: mod_base = OTHER; note = 2'-O-methyladenosine-3'-phosphate
  modified_base 17: mod_base = OTHER; note = 2'-O-methylguanosine-3'-phosphate
  modified_base 18: mod_base = OTHER; note = 2'-O-methylcytidine-3'-phosphate
  modified_base 19: mod_base = OTHER; note = 2'-O-methylcytidine-3'-phosphate
  modified_base 20: mod_base = OTHER; note = 2'-O-methyladenosine-3'-phosphate
  modified_base 21: mod_base = OTHER; note = 2'-O-methyluridine-3'-phosphate N-[tris(GalNAc-alkyl)-amidodecanoyl)]-4-hydroxyprolinol (Hyp-(GalNAc-alkyl)3)
cttcagcctcctcaaagccat

SEQ ID NO: 7171 - RNA, 21 nt, synthetic construct
  source 1..21: mol_type = other RNA
  modified_base 1: mod_base = OTHER; note = 2'-O-methylguanosine-3'-phosphorothioate
  modified_base 2: mod_base = OTHER; note = 2'-O-methylcytidine-3'-phosphorothioate
  modified_base 3: mod_base = OTHER; note = 2'-O-methylcytidine-3'-phosphate
  modified_base 4: mod_base = OTHER; note = 2'-O-methyluridine-3'-phosphate
  modified_base 5: mod_base = OTHER; note = 2'-O-methylcytidine-3'-phosphate
  modified_base 6: mod_base = OTHER; note = 2'-O-methylcytidine-3'-phosphate
  modified_base 7: mod_base = OTHER; note = 2'-fluorouridine-3'-phosphate
  modified_base 8: mod_base = OTHER; note = 2'-O-methylcytidine-3'-phosphate
  modified_base 9: mod_base = OTHER; note = 2'-fluoroadenosine-3'-phosphate
  modified_base 10: mod_base = OTHER; note = 2'-fluoroadenosine-3'-phosphate
  modified_base 11: mod_base = OTHER; note = 2'-fluoroadenosine-3'-phosphate
  modified_base 12: mod_base = OTHER; note = 2'-O-methylguanosine-3'-phosphate
  modified_base 13: mod_base = OTHER; note = 2'-O-methylcytidine-3'-phosphate
  modified_base 14: mod_base = OTHER; note = 2'-O-methylcytidine-3'-phosphate
  modified_base 15: mod_base = OTHER; note = 2'-O-methyladenosine-3'-phosphate
  modified_base 16: mod_base = OTHER; note = 2'-O-methyladenosine-3'-phosphate
  modified_base 17: mod_base = OTHER; note = 2'-O-methylcytidine-3'-phosphate
  modified_base 18: mod_base = OTHER; note = 2'-O-methyladenosine-3'-phosphate
  modified_base 19: mod_base = OTHER; note = 2'-O-methyladenosine-3'-phosphate
  modified_base 20: mod_base = OTHER; note = 2'-O-methyluridine-3'-phosphate
  modified_base 21: mod_base = OTHER; note = 2'-O-methyluridine-3'-phosphate N-[tris(GalNAc-alkyl)-amidodecanoyl)]-4-hydroxyprolinol (Hyp-(GalNAc-alkyl)3)
gcctcctcaaagccaacaatt

SEQ ID NO: 7172 - RNA, 21 nt, synthetic construct
  source 1..21: mol_type = other RNA
  modified_base 1: mod_base = OTHER; note = 2'-O-methylcytidine-3'-phosphorothioate
  modified_base 2: mod_base = OTHER; note = 2'-O-methylcytidine-3'-phosphorothioate
  modified_base 3: mod_base = OTHER; note = 2'-O-methyluridine-3'-phosphate
  modified_base 4: mod_base = OTHER; note = 2'-O-methylcytidine-3'-phosphate
  modified_base 5: mod_base = OTHER; note = 2'-O-methylcytidine-3'-phosphate
  modified_base 6: mod_base = OTHER; note = 2'-O-methyluridine-3'-phosphate
  modified_base 7: mod_base = OTHER; note = 2'-fluorocytidine-3'-phosphate
  modified_base 8: mod_base = OTHER; note = 2'-O-methyladenosine-3'-phosphate
  modified_base 9: mod_base = OTHER; note = 2'-fluoroadenosine-3'-phosphate
  modified_base 10: mod_base = OTHER; note = 2'-fluoroadenosine-3'-phosphate
  modified_base 11: mod_base = OTHER; note = 2'-fluoroguanosine-3'-phosphate
  modified_base 12: mod_base = OTHER; note = 2'-O-methylcytidine-3'-phosphate
  modified_base 13: mod_base = OTHER; note = 2'-O-methylcytidine-3'-phosphate
  modified_base 14: mod_base = OTHER; note = 2'-O-methyladenosine-3'-phosphate
  modified_base 15: mod_base = OTHER; note = 2'-O-methyladenosine-3'-phosphate
  modified_base 16: mod_base = OTHER; note = 2'-O-methylcytidine-3'-phosphate
  modified_base 17: mod_base = OTHER; note = 2'-O-methyladenosine-3'-phosphate
  modified_base 18: mod_base = OTHER; note = 2'-O-methyladenosine-3'-phosphate
  modified_base 19: mod_base = OTHER; note = 2'-O-methyluridine-3'-phosphate
  modified_base 20: mod_base = OTHER; note = 2'-O-methylcytidine-3'-phosphate
  modified_base 21: mod_base = OTHER; note = 2'-O-methyluridine-3'-phosphate N-[tris(GalNAc-alkyl)-amidodecanoyl)]-4-hydroxyprolinol (Hyp-(GalNAc-alkyl)3)
cctcctcaaagccaacaatct

SEQ ID NO: 7173 - RNA, 21 nt, synthetic construct
  source 1..21: mol_type = other RNA
  modified_base 1: mod_base = OTHER; note = 2'-O-methyladenosine-3'-phosphorothioate
  modified_base 2: mod_base = OTHER; note = 2'-O-methyladenosine-3'-phosphorothioate
  modified_base 3: mod_base = OTHER; note = 2'-O-methylcytidine-3'-phosphate
  modified_base 4: mod_base = OTHER; note = 2'-O-methyladenosine-3'-phosphate
  modified_base 5: mod_base = OTHER; note = 2'-O-methyladenosine-3'-phosphate
  modified_base 6: mod_base = OTHER; note = 2'-O-methyluridine-3'-phosphate
  modified_base 7: mod_base = OTHER; note = 2'-fluorocytidine-3'-phosphate
  modified_base 8: mod_base = OTHER; note = 2'-O-methylcytidine-3'-phosphate
  modified_base 9: mod_base = OTHER; note = 2'-fluorouridine-3'-phosphate
  modified_base 10: mod_base = OTHER; note = 2'-fluorouridine-3'-phosphate
  modified_base 11: mod_base = OTHER; note = 2'-fluoroguanosine-3'-phosphate
  modified_base 12: mod_base = OTHER; note = 2'-O-methylguanosine-3'-phosphate
  modified_base 13: mod_base = OTHER; note = 2'-O-methylcytidine-3'-phosphate
  modified_base 14: mod_base = OTHER; note = 2'-O-methylcytidine-3'-phosphate
  modified_base 15: mod_base = OTHER; note = 2'-O-methyluridine-3'-phosphate
  modified_base 16: mod_base = OTHER; note = 2'-O-methylguanosine-3'-phosphate
  modified_base 17: mod_base = OTHER; note = 2'-O-methylcytidine-3'-phosphate
  modified_base 18: mod_base = OTHER; note = 2'-O-methylcytidine-3'-phosphate
  modified_base 19: mod_base = OTHER; note = 2'-O-methyladenosine-3'-phosphate
  modified_base 20: mod_base = OTHER; note = 2'-O-methylguanosine-3'-phosphate
  modified_base 21: mod_base = OTHER; note = 2'-O-methyluridine-3'-phosphate N-[tris(GalNAc-alkyl)-amidodecanoyl)]-4-hydroxyprolinol (Hyp-(GalNAc-alkyl)3)
aacaatccttggcctgccagt

SEQ ID NO: 7174 - RNA, 21 nt, synthetic construct
  source 1..21: mol_type = other RNA
  modified_base 1: mod_base = OTHER; note = 2'-O-methyluridine-3'-phosphorothioate
  modified_base 2: mod_base = OTHER; note = 2'-O-methylcytidine-3'-phosphorothioate
  modified_base 3: mod_base = OTHER; note = 2'-O-methyluridine-3'-phosphate
  modified_base 4: mod_base = OTHER; note = 2'-O-methylcytidine-3'-phosphate
  modified_base 5: mod_base = OTHER; note = 2'-O-methylcytidine-3'-phosphate
  modified_base 6: mod_base = OTHER; note = 2'-O-methyluridine-3'-phosphate
  modified_base 7: mod_base = OTHER; note = 2'-fluorocytidine-3'-phosphate
  modified_base 8: mod_base = OTHER; note = 2'-O-methyluridine-3'-phosphate
  modified_base 9: mod_base = OTHER; note = 2'-fluoroadenosine-3'-phosphate
  modified_base 10: mod_base = OTHER; note = 2'-fluorocytidine-3'-phosphate
  modified_base 11: mod_base = OTHER; note = 2'-fluorocytidine-3'-phosphate
  modified_base 12: mod_base = OTHER; note = 2'-O-methyluridine-3'-phosphate
  modified_base 13: mod_base = OTHER; note = 2'-O-methylguanosine-3'-phosphate
  modified_base 14: mod_base = OTHER; note = 2'-O-methylguanosine-3'-phosphate
  modified_base 15: mod_base = OTHER; note = 2'-O-methyladenosine-3'-phosphate
  modified_base 16: mod_base = OTHER; note = 2'-O-methyluridine-3'-phosphate
  modified_base 17: mod_base = OTHER; note = 2'-O-methylcytidine-3'-phosphate
  modified_base 18: mod_base = OTHER; note = 2'-O-methyladenosine-3'-phosphate
  modified_base 19: mod_base = OTHER; note = 2'-O-methyluridine-3'-phosphate
  modified_base 20: mod_base = OTHER; note = 2'-O-methyladenosine-3'-phosphate
  modified_base 21: mod_base = OTHER; note = 2'-O-methyluridine-3'-phosphate N-[tris(GalNAc-alkyl)-amidodecanoyl)]-4-hydroxyprolinol (Hyp-(GalNAc-alkyl)3)
tctcctctacctggatcatat

SEQ ID NO: 7175 - RNA, 21 nt, synthetic construct
  source 1..21: mol_type = other RNA
  modified_base 1: mod_base = OTHER; note = 2'-O-methylcytidine-3'-phosphorothioate
  modified_base 2: mod_base = OTHER; note = 2'-O-methyluridine-3'-phosphorothioate
  modified_base 3: mod_base = OTHER; note = 2'-O-methylcytidine-3'-phosphate
  modified_base 4: mod_base = OTHER; note = 2'-O-methylcytidine-3'-phosphate
  modified_base 5: mod_base = OTHER; note = 2'-O-methyluridine-3'-phosphate
  modified_base 6: mod_base = OTHER; note = 2'-O-methylcytidine-3'-phosphate
  modified_base 7: mod_base = OTHER; note = 2'-fluorouridine-3'-phosphate
  modified_base 8: mod_base = OTHER; note = 2'-O-methyladenosine-3'-phosphate
  modified_base 9: mod_base = OTHER; note = 2'-fluorocytidine-3'-phosphate
  modified_base 10: mod_base = OTHER; note = 2'-fluorocytidine-3'-phosphate
  modified_base 11: mod_base = OTHER; note = 2'-fluorouridine-3'-phosphate
  modified_base 12: mod_base = OTHER; note = 2'-O-methylguanosine-3'-phosphate
  modified_base 13: mod_base = OTHER; note = 2'-O-methylguanosine-3'-phosphate
  modified_base 14: mod_base = OTHER; note = 2'-O-methyladenosine-3'-phosphate
  modified_base 15: mod_base = OTHER; note = 2'-O-methyluridine-3'-phosphate
  modified_base 16: mod_base = OTHER; note = 2'-O-methylcytidine-3'-phosphate
  modified_base 17: mod_base = OTHER; note = 2'-O-methyladenosine-3'-phosphate
  modified_base 18: mod_base = OTHER; note = 2'-O-methyluridine-3'-phosphate
  modified_base 19: mod_base = OTHER; note = 2'-O-methyladenosine-3'-phosphate
  modified_base 20: mod_base = OTHER; note = 2'-O-methyladenosine-3'-phosphate
  modified_base 21: mod_base = OTHER; note = 2'-O-methyluridine-3'-phosphate N-[tris(GalNAc-alkyl)-amidodecanoyl)]-4-hydroxyprolinol (Hyp-(GalNAc-alkyl)3)
ctcctctacctggatcataat

SEQ ID NO: 7176 - RNA, 21 nt, synthetic construct
  source 1..21: mol_type = other RNA
  modified_base 1: mod_base = OTHER; note = 2'-O-methylcytidine-3'-phosphorothioate
  modified_base 2: mod_base = OTHER; note = 2'-O-methyluridine-3'-phosphorothioate
  modified_base 3: mod_base = OTHER; note = 2'-O-methyladenosine-3'-phosphate
  modified_base 4: mod_base = OTHER; note = 2'-O-methylcytidine-3'-phosphate
  modified_base 5: mod_base = OTHER; note = 2'-O-methylcytidine-3'-phosphate
  modified_base 6: mod_base = OTHER; note = 2'-O-methyluridine-3'-phosphate
  modified_base 7: mod_base = OTHER; note = 2'-fluoroguanosine-3'-phosphate
  modified_base 8: mod_base = OTHER; note = 2'-O-methylguanosine-3'-phosphate
  modified_base 9: mod_base = OTHER; note = 2'-fluoroadenosine-3'-phosphate
  modified_base 10: mod_base = OTHER; note = 2'-fluorouridine-3'-phosphate
  modified_base 11: mod_base = OTHER; note = 2'-fluorocytidine-3'-phosphate
  modified_base 12: mod_base = OTHER; note = 2'-O-methyladenosine-3'-phosphate
  modified_base 13: mod_base = OTHER; note = 2'-O-methyluridine-3'-phosphate
  modified_base 14: mod_base = OTHER; note = 2'-O-methyladenosine-3'-phosphate
  modified_base 15: mod_base = OTHER; note = 2'-O-methyladenosine-3'-phosphate
  modified_base 16: mod_base = OTHER; note = 2'-O-methyluridine-3'-phosphate
  modified_base 17: mod_base = OTHER; note = 2'-O-methylguanosine-3'-phosphate
  modified_base 18: mod_base = OTHER; note = 2'-O-methylguanosine-3'-phosphate
  modified_base 19: mod_base = OTHER; note = 2'-O-methylcytidine-3'-phosphate
  modified_base 20: mod_base = OTHER; note = 2'-O-methyladenosine-3'-phosphate
  modified_base 21: mod_base = OTHER; note = 2'-O-methyluridine-3'-phosphate N-[tris(GalNAc-alkyl)-amidodecanoyl)]-4-hydroxyprolinol (Hyp-(GalNAc-alkyl)3)
ctacctggatcataatggcat

SEQ ID NO: 7177 - RNA, 21 nt, synthetic construct
  source 1..21: mol_type = other RNA
  modified_base 1: mod_base = OTHER; note = 2'-O-methyluridine-3'-phosphorothioate
  modified_base 2: mod_base = OTHER; note = 2'-O-methylcytidine-3'-phosphorothioate
  modified_base 3: mod_base = OTHER; note = 2'-O-methyladenosine-3'-phosphate
  modified_base 4: mod_base = OTHER; note = 2'-O-methyluridine-3'-phosphate
  modified_base 5: mod_base = OTHER; note = 2'-O-methyladenosine-3'-phosphate
  modified_base 6: mod_base = OTHER; note = 2'-O-methyladenosine-3'-phosphate
  modified_base 7: mod_base = OTHER; note = 2'-fluorouridine-3'-phosphate
  modified_base 8: mod_base = OTHER; note = 2'-O-methylguanosine-3'-phosphate
  modified_base 9: mod_base = OTHER; note = 2'-fluoroguanosine-3'-phosphate
  modified_base 10: mod_base = OTHER; note = 2'-fluorocytidine-3'-phosphate
  modified_base 11: mod_base = OTHER; note = 2'-fluoroadenosine-3'-phosphate
  modified_base 12: mod_base = OTHER; note = 2'-O-methyladenosine-3'-phosphate
  modified_base 13: mod_base = OTHER; note = 2'-O-methyluridine-3'-phosphate
  modified_base 14: mod_base = OTHER; note = 2'-O-methylguanosine-3'-phosphate
  modified_base 15: mod_base = OTHER; note = 2'-O-methyluridine-3'-phosphate
  modified_base 16: mod_base = OTHER; note = 2'-O-methylguanosine-3'-phosphate
  modified_base 17: mod_base = OTHER; note = 2'-O-methylguanosine-3'-phosphate
  modified_base 18: mod_base = OTHER; note = 2'-O-methyluridine-3'-phosphate
  modified_base 19: mod_base = OTHER; note = 2'-O-methylcytidine-3'-phosphate
  modified_base 20: mod_base = OTHER; note = 2'-O-methyladenosine-3'-phosphate
  modified_base 21: mod_base = OTHER; note = 2'-O-methyluridine-3'-phosphate N-[tris(GalNAc-alkyl)-amidodecanoyl)]-4-hydroxyprolinol (Hyp-(GalNAc-alkyl)3)
tcataatggcaatgtggtcat

SEQ ID NO: 7178 - RNA, 21 nt, synthetic construct
  source 1..21: mol_type = other RNA
  modified_base 1: mod_base = OTHER; note = 2'-O-methyluridine-3'-phosphorothioate
  modified_base 2: mod_base = OTHER; note = 2'-O-methyladenosine-3'-phosphorothioate
  modified_base 3: mod_base = OTHER; note = 2'-O-methyladenosine-3'-phosphate
  modified_base 4: mod_base = OTHER; note = 2'-O-methyluridine-3'-phosphate
  modified_base 5: mod_base = OTHER; note = 2'-O-methylguanosine-3'-phosphate
  modified_base 6: mod_base = OTHER; note = 2'-O-methylguanosine-3'-phosphate
  modified_base 7: mod_base = OTHER; note = 2'-fluorocytidine-3'-phosphate
  modified_base 8: mod_base = OTHER; note = 2'-O-methyladenosine-3'-phosphate
  modified_base 9: mod_base = OTHER; note = 2'-fluoroadenosine-3'-phosphate
  modified_base 10: mod_base = OTHER; note = 2'-fluorouridine-3'-phosphate
  modified_base 11: mod_base = OTHER; note = 2'-fluoroguanosine-3'-phosphate
  modified_base 12: mod_base = OTHER; note = 2'-O-methyluridine-3'-phosphate
  modified_base 13: mod_base = OTHER; note = 2'-O-methylguanosine-3'-phosphate
  modified_base 14: mod_base = OTHER; note = 2'-O-methylguanosine-3'-phosphate
  modified_base 15: mod_base = OTHER; note = 2'-O-methyluridine-3'-phosphate
  modified_base 16: mod_base = OTHER; note = 2'-O-methylcytidine-3'-phosphate
  modified_base 17: mod_base = OTHER; note = 2'-O-methyladenosine-3'-phosphate
  modified_base 18: mod_base = OTHER; note = 2'-O-methyladenosine-3'-phosphate
  modified_base 19: mod_base = OTHER; note = 2'-O-methylguanosine-3'-phosphate
  modified_base 20: mod_base = OTHER; note = 2'-O-methyladenosine-3'-phosphate
  modified_base 21: mod_base = OTHER; note = 2'-O-methyluridine-3'-phosphate N-[tris(GalNAc-alkyl)-amidodecanoyl)]-4-hydroxyprolinol (Hyp-(GalNAc-alkyl)3)
taatggcaatgtggtcaagat

SEQ ID NO: 7179 - RNA, 21 nt, synthetic construct
  source 1..21: mol_type = other RNA
  modified_base 1: mod_base = OTHER; note = 2'-O-methyladenosine-3'-phosphorothioate
  modified_base 2: mod_base = OTHER; note = 2'-O-methyluridine-3'-phosphorothioate
  modified_base 3: mod_base = OTHER; note = 2'-O-methylguanosine-3'-phosphate
  modified_base 4: mod_base = OTHER; note = 2'-O-methylguanosine-3'-phosphate
  modified_base 5: mod_base = OTHER; note = 2'-O-methylcytidine-3'-phosphate
  modified_base 6: mod_base = OTHER; note = 2'-O-methyladenosine-3'-phosphate
  modified_base 7: mod_base = OTHER; note = 2'-fluoroadenosine-3'-phosphate
  modified_base 8: mod_base = OTHER; note = 2'-O-methyluridine-3'-phosphate
  modified_base 9: mod_base = OTHER; note = 2'-fluoroguanosine-3'-phosphate
  modified_base 10: mod_base = OTHER; note = 2'-fluorouridine-3'-phosphate
  modified_base 11: mod_base = OTHER; note = 2'-fluoroguanosine-3'-phosphate
  modified_base 12: mod_base = OTHER; note = 2'-O-methylguanosine-3'-phosphate
  modified_base 13: mod_base = OTHER; note = 2'-O-methyluridine-3'-phosphate
  modified_base 14: mod_base = OTHER; note = 2'-O-methylcytidine-3'-phosphate
  modified_base 15: mod_base = OTHER; note = 2'-O-methyladenosine-3'-phosphate
  modified_base 16: mod_base = OTHER; note = 2'-O-methyladenosine-3'-phosphate
  modified_base 17: mod_base = OTHER; note = 2'-O-methylguanosine-3'-phosphate
  modified_base 18: mod_base = OTHER; note = 2'-O-methyladenosine-3'-phosphate
  modified_base 19: mod_base = OTHER; note = 2'-O-methylcytidine-3'-phosphate
  modified_base 20: mod_base = OTHER; note = 2'-O-methylguanosine-3'-phosphate
  modified_base 21: mod_base = OTHER; note = 2'-O-methyluridine-3'-phosphate N-[tris(GalNAc-alkyl)-amidodecanoyl)]-4-hydroxyprolinol (Hyp-(GalNAc-alkyl)3)
atggcaatgtggtcaagacgt

SEQ ID NO: 7180 - RNA, 21 nt, synthetic construct
  source 1..21: mol_type = other RNA
  modified_base 1: mod_base = OTHER; note = 2'-O-methyluridine-3'-phosphorothioate
  modified_base 2: mod_base = OTHER; note = 2'-O-methylguanosine-3'-phosphorothioate
  modified_base 3: mod_base = OTHER; note = 2'-O-methylguanosine-3'-phosphate
  modified_base 4: mod_base = OTHER; note = 2'-O-methylcytidine-3'-phosphate
  modified_base 5: mod_base = OTHER; note = 2'-O-methyladenosine-3'-phosphate
  modified_base 6: mod_base = OTHER; note = 2'-O-methyladenosine-3'-phosphate
  modified_base 7: mod_base = OTHER; note = 2'-fluorouridine-3'-phosphate
  modified_base 8: mod_base = OTHER; note = 2'-O-methylguanosine-3'-phosphate
  modified_base 9: mod_base = OTHER; note = 2'-fluorouridine-3'-phosphate
  modified_base 10: mod_base = OTHER; note = 2'-fluoroguanosine-3'-phosphate
  modified_base 11: mod_base = OTHER; note = 2'-fluoroguanosine-3'-phosphate
  modified_base 12: mod_base = OTHER; note = 2'-O-methyluridine-3'-phosphate
  modified_base 13: mod_base = OTHER; note = 2'-O-methylcytidine-3'-phosphate
  modified_base 14: mod_base = OTHER; note = 2'-O-methyladenosine-3'-phosphate
  modified_base 15: mod_base = OTHER; note = 2'-O-methyladenosine-3'-phosphate
  modified_base 16: mod_base = OTHER; note = 2'-O-methylguanosine-3'-phosphate
  modified_base 17: mod_base = OTHER; note = 2'-O-methyladenosine-3'-phosphate
  modified_base 18: mod_base = OTHER; note = 2'-O-methylcytidine-3'-phosphate
  modified_base 19: mod_base = OTHER; note = 2'-O-methylguanosine-3'-phosphate
  modified_base 20: mod_base = OTHER; note = 2'-O-methylguanosine-3'-phosphate
  modified_base 21: mod_base = OTHER; note = 2'-O-methyluridine-3'-phosphate N-[tris(GalNAc-alkyl)-amidodecanoyl)]-4-hydroxyprolinol (Hyp-(GalNAc-alkyl)3)
tggcaatgtggtcaagacggt

SEQ ID NO: 7181 - RNA, 21 nt, synthetic construct
  source 1..21: mol_type = other RNA
  modified_base 1: mod_base = OTHER; note = 2'-O-methylguanosine-3'-phosphorothioate
  modified_base 2: mod_base = OTHER; note = 2'-O-methyluridine-3'-phosphorothioate
  modified_base 3: mod_base = OTHER; note = 2'-O-methylguanosine-3'-phosphate
  modified_base 4: mod_base = OTHER; note = 2'-O-methylguanosine-3'-phosphate
  modified_base 5: mod_base = OTHER; note = 2'-O-methyluridine-3'-phosphate
  modified_base 6: mod_base = OTHER; note = 2'-O-methylcytidine-3'-phosphate
  modified_base 7: mod_base = OTHER; note = 2'-fluoroadenosine-3'-phosphate
  modified_base 8: mod_base = OTHER; note = 2'-O-methyladenosine-3'-phosphate
  modified_base 9: mod_base = OTHER; note = 2'-fluoroguanosine-3'-phosphate
  modified_base 10: mod_base = OTHER; note = 2'-fluoroadenosine-3'-phosphate
  modified_base 11: mod_base = OTHER; note = 2'-fluorocytidine-3'-phosphate
  modified_base 12: mod_base = OTHER; note = 2'-O-methylguanosine-3'-phosphate
  modified_base 13: mod_base = OTHER; note = 2'-O-methylguanosine-3'-phosphate
  modified_base 14: mod_base = OTHER; note = 2'-O-methyladenosine-3'-phosphate
  modified_base 15: mod_base = OTHER; note = 2'-O-methyluridine-3'-phosphate
  modified_base 16: mod_base = OTHER; note = 2'-O-methylguanosine-3'-phosphate
  modified_base 17: mod_base = OTHER; note = 2'-O-methyluridine-3'-phosphate
  modified_base 18: mod_base = OTHER; note = 2'-O-methylguanosine-3'-phosphate
  modified_base 19: mod_base = OTHER; note = 2'-O-methylcytidine-3'-phosphate
  modified_base 20: mod_base = OTHER; note = 2'-O-methylcytidine-3'-phosphate
  modified_base 21: mod_base = OTHER; note = 2'-O-methyluridine-3'-phosphate N-[tris(GalNAc-alkyl)-amidodecanoyl)]-4-hydroxyprolinol (Hyp-(GalNAc-alkyl)3)
gtggtcaagacggatgtgcct

SEQ ID NO: 7182 - RNA, 21 nt, synthetic construct
  source 1..21: mol_type = other RNA
  modified_base 1: mod_base = OTHER; note = 2'-O-methylguanosine-3'-phosphorothioate
  modified_base 2: mod_base = OTHER; note = 2'-O-methylguanosine-3'-phosphorothioate
  modified_base 3: mod_base = OTHER; note = 2'-O-methyluridine-3'-phosphate
  modified_base 4: mod_base = OTHER; note = 2'-O-methylcytidine-3'-phosphate
  modified_base 5: mod_base = OTHER; note = 2'-O-methyladenosine-3'-phosphate
  modified_base 6: mod_base = OTHER; note = 2'-O-methyladenosine-3'-phosphate
  modified_base 7: mod_base = OTHER; note = 2'-fluoroguanosine-3'-phosphate
  modified_base 8: mod_base = OTHER; note = 2'-O-methyladenosine-3'-phosphate
  modified_base 9: mod_base = OTHER; note = 2'-fluorocytidine-3'-phosphate
  modified_base 10: mod_base = OTHER; note = 2'-fluoroguanosine-3'-phosphate
  modified_base 11: mod_base = OTHER; note = 2'-fluoroguanosine-3'-phosphate
  modified_base 12: mod_base = OTHER; note = 2'-O-methyladenosine-3'-phosphate
  modified_base 13: mod_base = OTHER; note = 2'-O-methyluridine-3'-phosphate
  modified_base 14: mod_base = OTHER; note = 2'-O-methylguanosine-3'-phosphate
  modified_base 15: mod_base = OTHER; note = 2'-O-methyluridine-3'-phosphate
  modified_base 16: mod_base = OTHER; note = 2'-O-methylguanosine-3'-phosphate
  modified_base 17: mod_base = OTHER; note = 2'-O-methylcytidine-3'-phosphate
  modified_base 18: mod_base = OTHER; note = 2'-O-methylcytidine-3'-phosphate
  modified_base 19: mod_base = OTHER; note = 2'-O-methyladenosine-3'-phosphate
  modified_base 20: mod_base = OTHER; note = 2'-O-methylguanosine-3'-phosphate
  modified_base 21: mod_base = OTHER; note = 2'-O-methyluridine-3'-phosphate N-[tris(GalNAc-alkyl)-amidodecanoyl)]-4-hydroxyprolinol (Hyp-(GalNAc-alkyl)3)
ggtcaagacggatgtgccagt

SEQ ID NO: 7183 - RNA, 21 nt, synthetic construct
  source 1..21: mol_type = other RNA
  modified_base 1: mod_base = OTHER; note = 2'-O-methyluridine-3'-phosphorothioate
  modified_base 2: mod_base = OTHER; note = 2'-O-methylguanosine-3'-phosphorothioate
  modified_base 3: mod_base = OTHER; note = 2'-O-methylguanosine-3'-phosphate
  modified_base 4: mod_base = OTHER; note = 2'-O-methyluridine-3'-phosphate
  modified_base 5: mod_base = OTHER; note = 2'-O-methylguanosine-3'-phosphate
  modified_base 6: mod_base = OTHER; note = 2'-O-methylguanosine-3'-phosphate
  modified_base 7: mod_base = OTHER; note = 2'-fluorouridine-3'-phosphate
  modified_base 8: mod_base = OTHER; note = 2'-O-methylguanosine-3'-phosphate
  modified_base 9: mod_base = OTHER; note = 2'-fluoroguanosine-3'-phosphate
  modified_base 10: mod_base = OTHER; note = 2'-fluoroadenosine-3'-phosphate
  modified_base 11: mod_base = OTHER; note = 2'-fluoroguanosine-3'-phosphate
  modified_base 12: mod_base = OTHER; note = 2'-O-methylguanosine-3'-phosphate
  modified_base 13: mod_base = OTHER; note = 2'-O-methylcytidine-3'-phosphate
  modified_base 14: mod_base = OTHER; note = 2'-O-methylcytidine-3'-phosphate
  modified_base 15: mod_base = OTHER; note = 2'-O-methyluridine-3'-phosphate
  modified_base 16: mod_base = OTHER; note = 2'-O-methylguanosine-3'-phosphate
  modified_base 17: mod_base = OTHER; note = 2'-O-methyluridine-3'-phosphate
  modified_base 18: mod_base = OTHER; note = 2'-O-methylguanosine-3'-phosphate
  modified_base 19: mod_base = OTHER; note = 2'-O-methylguanosine-3'-phosphate
  modified_base 20: mod_base = OTHER; note = 2'-O-methylcytidine-3'-phosphate
  modified_base 21: mod_base = OTHER; note = 2'-O-methyluridine-3'-phosphate N-[tris(GalNAc-alkyl)-amidodecanoyl)]-4-hydroxyprolinol (Hyp-(GalNAc-alkyl)3)
tggtggtggaggcctgtggct

SEQ ID NO: 7184 - RNA, 21 nt, synthetic construct
  source 1..21: mol_type = other RNA
  modified_base 1: mod_base = OTHER; note = 2'-O-methylcytidine-3'-phosphorothioate
  modified_base 2: mod_base = OTHER; note = 2'-O-methylcytidine-3'-phosphorothioate
  modified_base 3: mod_base = OTHER; note = 2'-O-methyluridine-3'-phosphate
  modified_base 4: mod_base = OTHER; note = 2'-O-methylguanosine-3'-phosphate
  modified_base 5: mod_base = OTHER; note = 2'-O-methyluridine-3'-phosphate
  modified_base 6: mod_base = OTHER; note = 2'-O-methylguanosine-3'-phosphate
  modified_base 7: mod_base = OTHER; note = 2'-fluoroguanosine-3'-phosphate
  modified_base 8: mod_base = OTHER; note = 2'-O-methylcytidine-3'-phosphate
  modified_base 9: mod_base = OTHER; note = 2'-fluorouridine-3'-phosphate
  modified_base 10: mod_base = OTHER; note = 2'-fluoroguanosine-3'-phosphate
  modified_base 11: mod_base = OTHER; note = 2'-fluorocytidine-3'-phosphate
  modified_base 12: mod_base = OTHER; note = 2'-O-methyladenosine-3'-phosphate
  modified_base 13: mod_base = OTHER; note = 2'-O-methylguanosine-3'-phosphate
  modified_base 14: mod_base = OTHER; note = 2'-O-methylcytidine-3'-phosphate
  modified_base 15: mod_base = OTHER; note = 2'-O-methyluridine-3'-phosphate
  modified_base 16: mod_base = OTHER; note = 2'-O-methyladenosine-3'-phosphate
  modified_base 17: mod_base = OTHER; note = 2'-O-methylguanosine-3'-phosphate
  modified_base 18: mod_base = OTHER; note = 2'-O-methylcytidine-3'-phosphate
  modified_base 19: mod_base = OTHER; note = 2'-O-methyladenosine-3'-phosphate
  modified_base 20: mod_base = OTHER; note = 2'-O-methyladenosine-3'-phosphate
  modified_base 21: mod_base = OTHER; note = 2'-O-methyluridine-3'-phosphate N-[tris(GalNAc-alkyl)-amidodecanoyl)]-4-hydroxyprolinol (Hyp-(GalNAc-alkyl)3)
cctgtggctgcagctagcaat

SEQ ID NO: 7185 - RNA, 21 nt, synthetic construct
  source 1..21: mol_type = other RNA
  modified_base 1: mod_base = OTHER; note = 2'-O-methylcytidine-3'-phosphorothioate
  modified_base 2: mod_base = OTHER; note = 2'-O-methyluridine-3'-phosphorothioate
  modified_base 3: mod_base = OTHER; note = 2'-O-methylguanosine-3'-phosphate
  modified_base 4: mod_base = OTHER; note = 2'-O-methyluridine-3'-phosphate
  modified_base 5: mod_base = OTHER; note = 2'-O-methylguanosine-3'-phosphate
  modified_base 6: mod_base = OTHER; note = 2'-O-methylguanosine-3'-phosphate
  modified_base 7: mod_base = OTHER; note = 2'-fluorocytidine-3'-phosphate
  modified_base 8: mod_base = OTHER; note = 2'-O-methyluridine-3'-phosphate
  modified_base 9: mod_base = OTHER; note = 2'-fluoroguanosine-3'-phosphate
  modified_base 10: mod_base = OTHER; note = 2'-fluorocytidine-3'-phosphate
  modified_base 11: mod_base = OTHER; note = 2'-fluoroadenosine-3'-phosphate
  modified_base 12: mod_base = OTHER; note = 2'-O-methylguanosine-3'-phosphate
  modified_base 13: mod_base = OTHER; note = 2'-O-methylcytidine-3'-phosphate
  modified_base 14: mod_base = OTHER; note = 2'-O-methyluridine-3'-phosphate
  modified_base 15: mod_base = OTHER; note = 2'-O-methyladenosine-3'-phosphate
  modified_base 16: mod_base = OTHER; note = 2'-O-methylguanosine-3'-phosphate
  modified_base 17: mod_base = OTHER; note = 2'-O-methylcytidine-3'-phosphate
  modified_base 18: mod_base = OTHER; note = 2'-O-methyladenosine-3'-phosphate
  modified_base 19: mod_base = OTHER; note = 2'-O-methyladenosine-3'-phosphate
  modified_base 20: mod_base = OTHER; note = 2'-O-methylguanosine-3'-phosphate
  modified_base 21: mod_base = OTHER; note = 2'-O-methyluridine-3'-phosphate N-[tris(GalNAc-alkyl)-amidodecanoyl)]-4-hydroxyprolinol (Hyp-(GalNAc-alkyl)3)
ctgtggctgcagctagcaagt

SEQ ID NO: 7186 - RNA, 21 nt, synthetic construct
  source 1..21: mol_type = other RNA
  modified_base 1: mod_base = OTHER; note = 2'-O-methylguanosine-3'-phosphorothioate
  modified_base 2: mod_base = OTHER; note = 2'-O-methylguanosine-3'-phosphorothioate
  modified_base 3: mod_base = OTHER; note = 2'-O-methylcytidine-3'-phosphate
  modified_base 4: mod_base = OTHER; note = 2'-O-methyluridine-3'-phosphate
  modified_base 5: mod_base = OTHER; note = 2'-O-methylguanosine-3'-phosphate
  modified_base 6: mod_base = OTHER; note = 2'-O-methylcytidine-3'-phosphate
  modified_base 7: mod_base = OTHER; note = 2'-fluoroadenosine-3'-phosphate
  modified_base 8: mod_base = OTHER; note = 2'-O-methylguanosine-3'-phosphate
  modified_base 9: mod_base = OTHER; note = 2'-fluorocytidine-3'-phosphate
  modified_base 10: mod_base = OTHER; note = 2'-fluorouridine-3'-phosphate
  modified_base 11: mod_base = OTHER; note = 2'-fluoroadenosine-3'-phosphate
  modified_base 12: mod_base = OTHER; note = 2'-O-methylguanosine-3'-phosphate
  modified_base 13: mod_base = OTHER; note = 2'-O-methylcytidine-3'-phosphate
  modified_base 14: mod_base = OTHER; note = 2'-O-methyladenosine-3'-phosphate
  modified_base 15: mod_base = OTHER; note = 2'-O-methyladenosine-3'-phosphate
  modified_base 16: mod_base = OTHER; note = 2'-O-methylguanosine-3'-phosphate
  modified_base 17: mod_base = OTHER; note = 2'-O-methyladenosine-3'-phosphate
  modified_base 18: mod_base = OTHER; note = 2'-O-methylguanosine-3'-phosphate
  modified_base 19: mod_base = OTHER; note = 2'-O-methylguanosine-3'-phosphate
  modified_base 20: mod_base = OTHER; note = 2'-O-methyladenosine-3'-phosphate
  modified_base 21: mod_base = OTHER; note = 2'-O-methyluridine-3'-phosphate N-[tris(GalNAc-alkyl)-amidodecanoyl)]-4-hydroxyprolinol (Hyp-(GalNAc-alkyl)3)
ggctgcagctagcaagaggat

SEQ ID NO: 7187 - RNA, 21 nt, synthetic construct
  source 1..21: mol_type = other RNA
  modified_base 1: mod_base = OTHER; note = 2'-O-methylcytidine-3'-phosphorothioate
  modified_base 2: mod_base = OTHER; note = 2'-O-methyluridine-3'-phosphorothioate
  modified_base 3: mod_base = OTHER; note = 2'-O-methylguanosine-3'-phosphate
  modified_base 4: mod_base = OTHER; note = 2'-O-methylcytidine-3'-phosphate
  modified_base 5: mod_base = OTHER; note = 2'-O-methyladenosine-3'-phosphate
  modified_base 6: mod_base = OTHER; note = 2'-O-methylguanosine-3'-phosphate
  modified_base 7: mod_base = OTHER; note = 2'-fluorocytidine-3'-phosphate
  modified_base 8: mod_base = OTHER; note = 2'-O-methyluridine-3'-phosphate
  modified_base 9: mod_base = OTHER; note = 2'-fluoroadenosine-3'-phosphate
  modified_base 10: mod_base = OTHER; note = 2'-fluoroguanosine-3'-phosphate
  modified_base 11: mod_base = OTHER; note = 2'-fluorocytidine-3'-phosphate
  modified_base 12: mod_base = OTHER; note = 2'-O-methyladenosine-3'-phosphate
  modified_base 13: mod_base = OTHER; note = 2'-O-methyladenosine-3'-phosphate
  modified_base 14: mod_base = OTHER; note = 2'-O-methylguanosine-3'-phosphate
  modified_base 15: mod_base = OTHER; note = 2'-O-methyladenosine-3'-phosphate
  modified_base 16: mod_base = OTHER; note = 2'-O-methylguanosine-3'-phosphate
  modified_base 17: mod_base = OTHER; note = 2'-O-methylguanosine-3'-phosphate
  modified_base 18: mod_base = OTHER; note = 2'-O-methyladenosine-3'-phosphate
  modified_base 19: mod_base = OTHER; note = 2'-O-methylcytidine-3'-phosphate
  modified_base 20: mod_base = OTHER; note = 2'-O-methylcytidine-3'-phosphate
  modified_base 21: mod_base = OTHER; note = 2'-O-methyluridine-3'-phosphate N-[tris(GalNAc-alkyl)-amidodecanoyl)]-4-hydroxyprolinol (Hyp-(GalNAc-alkyl)3)
ctgcagctagcaagaggacct

SEQ ID NO: 7188 - RNA, 21 nt, synthetic construct
  source 1..21: mol_type = other RNA
  modified_base 1: mod_base = OTHER; note = 2'-O-methylcytidine-3'-phosphorothioate
  modified_base 2: mod_base = OTHER; note = 2'-O-methyladenosine-3'-phosphorothioate
  modified_base 3: mod_base = OTHER; note = 2'-O-methylguanosine-3'-phosphate
  modified_base 4: mod_base = OTHER; note = 2'-O-methylcytidine-3'-phosphate
  modified_base 5: mod_base = OTHER; note = 2'-O-methyluridine-3'-phosphate
  modified_base 6: mod_base = OTHER; note = 2'-O-methyladenosine-3'-phosphate
  modified_base 7: mod_base = OTHER; note = 2'-fluoroguanosine-3'-phosphate
  modified_base 8: mod_base = OTHER; note = 2'-O-methylcytidine-3'-phosphate
  modified_base 9: mod_base = OTHER; note = 2'-fluoroadenosine-3'-phosphate
  modified_base 10: mod_base = OTHER; note = 2'-fluoroadenosine-3'-phosphate
  modified_base 11: mod_base = OTHER; note = 2'-fluoroguanosine-3'-phosphate
  modified_base 12: mod_base = OTHER; note = 2'-O-methyladenosine-3'-phosphate
  modified_base 13: mod_base = OTHER; note = 2'-O-methylguanosine-3'-phosphate
  modified_base 14: mod_base = OTHER; note = 2'-O-methylguanosine-3'-phosphate
  modified_base 15: mod_base = OTHER; note = 2'-O-methyladenosine-3'-phosphate
  modified_base 16: mod_base = OTHER; note = 2'-O-methylcytidine-3'-phosphate
  modified_base 17: mod_base = OTHER; note = 2'-O-methylcytidine-3'-phosphate
  modified_base 18: mod_base = OTHER; note = 2'-O-methyluridine-3'-phosphate
  modified_base 19: mod_base = OTHER; note = 2'-O-methylguanosine-3'-phosphate
  modified_base 20: mod_base = OTHER; note = 2'-O-methylguanosine-3'-phosphate
  modified_base 21: mod_base = OTHER; note = 2'-O-methyluridine-3'-phosphate N-[tris(GalNAc-alkyl)-amidodecanoyl)]-4-hydroxyprolinol (Hyp-(GalNAc-alkyl)3)
cagctagcaagaggacctggt

SEQ ID NO: 7189 - RNA, 21 nt, synthetic construct
  source 1..21: mol_type = other RNA
  modified_base 1: mod_base = OTHER; note = 2'-O-methylguanosine-3'-phosphorothioate
  modified_base 2: mod_base = OTHER; note = 2'-O-methylcytidine-3'-phosphorothioate
  modified_base 3: mod_base = OTHER; note = 2'-O-methyluridine-3'-phosphate
  modified_base 4: mod_base = OTHER; note = 2'-O-methyluridine-3'-phosphate
  modified_base 5: mod_base = OTHER; note = 2'-O-methyluridine-3'-phosphate
  modified_base 6: mod_base = OTHER; note = 2'-O-methylguanosine-3'-phosphate
  modified_base 7: mod_base = OTHER; note = 2'-fluoroguanosine-3'-phosphate
  modified_base 8: mod_base = OTHER; note = 2'-O-methyladenosine-3'-phosphate
  modified_base 9: mod_base = OTHER; note = 2'-fluoroguanosine-3'-phosphate
  modified_base 10: mod_base = OTHER; note = 2'-fluorouridine-3'-phosphate
  modified_base 11: mod_base = OTHER; note = 2'-fluoroguanosine-3'-phosphate
  modified_base 12: mod_base = OTHER; note = 2'-O-methyladenosine-3'-phosphate
  modified_base 13: mod_base = OTHER; note = 2'-O-methyladenosine-3'-phosphate
  modified_base 14: mod_base = OTHER; note = 2'-O-methylguanosine-3'-phosphate
  modified_base 15: mod_base = OTHER; note = 2'-O-methyladenosine-3'-phosphate
  modified_base 16: mod_base = OTHER; note = 2'-O-methylguanosine-3'-phosphate
  modified_base 17: mod_base = OTHER; note = 2'-O-methyladenosine-3'-phosphate
  modified_base 18: mod_base = OTHER; note = 2'-O-methylcytidine-3'-phosphate
  modified_base 19: mod_base = OTHER; note = 2'-O-methylcytidine-3'-phosphate
  modified_base 20: mod_base = OTHER; note = 2'-O-methyladenosine-3'-phosphate
  modified_base 21: mod_base = OTHER; note = 2'-O-methyluridine-3'-phosphate N-[tris(GalNAc-alkyl)-amidodecanoyl)]-4-hydroxyprolinol (Hyp-(GalNAc-alkyl)3)
gctttggagtgaagagaccat

SEQ ID NO: 7190 - RNA, 21 nt, synthetic construct
  source 1..21: mol_type = other RNA
  modified_base 1: mod_base = OTHER; note = 2'-O-methyluridine-3'-phosphorothioate
  modified_base 2: mod_base = OTHER; note = 2'-O-methyluridine-3'-phosphorothioate
  modified_base 3: mod_base = OTHER; note = 2'-O-methyluridine-3'-phosphate
  modified_base 4: mod_base = OTHER; note = 2'-O-methylguanosine-3'-phosphate
  modified_base 5: mod_base = OTHER; note = 2'-O-methylguanosine-3'-phosphate
  modified_base 6: mod_base = OTHER; note = 2'-O-methyladenosine-3'-phosphate
  modified_base 7: mod_base = OTHER; note = 2'-fluoroguanosine-3'-phosphate
  modified_base 8: mod_base = OTHER; note = 2'-O-methyluridine-3'-phosphate
  modified_base 9: mod_base = OTHER; note = 2'-fluoroguanosine-3'-phosphate
  modified_base 10: mod_base = OTHER; note = 2'-fluoroadenosine-3'-phosphate
  modified_base 11: mod_base = OTHER; note = 2'-fluoroadenosine-3'-phosphate
  modified_base 12: mod_base = OTHER; note = 2'-O-methylguanosine-3'-phosphate
  modified_base 13: mod_base = OTHER; note = 2'-O-methyladenosine-3'-phosphate
  modified_base 14: mod_base = OTHER; note = 2'-O-methylguanosine-3'-phosphate
  modified_base 15: mod_base = OTHER; note = 2'-O-methyladenosine-3'-phosphate
  modified_base 16: mod_base = OTHER; note = 2'-O-methylcytidine-3'-phosphate
  modified_base 17: mod_base = OTHER; note = 2'-O-methylcytidine-3'-phosphate
  modified_base 18: mod_base = OTHER; note = 2'-O-methyladenosine-3'-phosphate
  modified_base 19: mod_base = OTHER; note = 2'-O-methyladenosine-3'-phosphate
  modified_base 20: mod_base = OTHER; note = 2'-O-methylguanosine-3'-phosphate
  modified_base 21: mod_base = OTHER; note = 2'-O-methyluridine-3'-phosphate N-[tris(GalNAc-alkyl)-amidodecanoyl)]-4-hydroxyprolinol (Hyp-(GalNAc-alkyl)3)
tttggagtgaagagaccaagt

SEQ ID NO: 7191 - RNA, 21 nt, synthetic construct
  source 1..21: mol_type = other RNA
  modified_base 1: mod_base = OTHER; note = 2'-O-methylguanosine-3'-phosphorothioate
  modified_base 2: mod_base = OTHER; note = 2'-O-methyladenosine-3'-phosphorothioate
  modified_base 3: mod_base = OTHER; note = 2'-O-methylguanosine-3'-phosphate
  modified_base 4: mod_base = OTHER; note = 2'-O-methyluridine-3'-phosphate
  modified_base 5: mod_base = OTHER; note = 2'-O-methylguanosine-3'-phosphate
  modified_base 6: mod_base = OTHER; note = 2'-O-methyladenosine-3'-phosphate
  modified_base 7: mod_base = OTHER; note = 2'-fluoroadenosine-3'-phosphate
  modified_base 8: mod_base = OTHER; note = 2'-O-methylguanosine-3'-phosphate
  modified_base 9: mod_base = OTHER; note = 2'-fluoroadenosine-3'-phosphate
  modified_base 10: mod_base = OTHER; note = 2'-fluoroguanosine-3'-phosphate
  modified_base 11: mod_base = OTHER; note = 2'-fluoroadenosine-3'-phosphate
  modified_base 12: mod_base = OTHER; note = 2'-O-methylcytidine-3'-phosphate
  modified_base 13: mod_base = OTHER; note = 2'-O-methylcytidine-3'-phosphate
  modified_base 14: mod_base = OTHER; note = 2'-O-methyladenosine-3'-phosphate
  modified_base 15: mod_base = OTHER; note = 2'-O-methyladenosine-3'-phosphate
  modified_base 16: mod_base = OTHER; note = 2'-O-methylguanosine-3'-phosphate
  modified_base 17: mod_base = OTHER; note = 2'-O-methyladenosine-3'-phosphate
  modified_base 18: mod_base = OTHER; note = 2'-O-methyluridine-3'-phosphate
  modified_base 19: mod_base = OTHER; note = 2'-O-methylguanosine-3'-phosphate
  modified_base 20: mod_base = OTHER; note = 2'-O-methyladenosine-3'-phosphate
  modified_base 21: mod_base = OTHER; note = 2'-O-methyluridine-3'-phosphate N-[tris(GalNAc-alkyl)-amidodecanoyl)]-4-hydroxyprolinol (Hyp-(GalNAc-alkyl)3)
gagtgaagagaccaagatgat

SEQ ID NO: 7192 - RNA, 21 nt, synthetic construct
  source 1..21: mol_type = other RNA
  modified_base 1: mod_base = OTHER; note = 2'-O-methyluridine-3'-phosphorothioate
  modified_base 2: mod_base = OTHER; note = 2'-O-methylguanosine-3'-phosphorothioate
  modified_base 3: mod_base = OTHER; note = 2'-O-methyladenosine-3'-phosphate
  modified_base 4: mod_base = OTHER; note = 2'-O-methyladenosine-3'-phosphate
  modified_base 5: mod_base = OTHER; note = 2'-O-methylguanosine-3'-phosphate
  modified_base 6: mod_base = OTHER; note = 2'-O-methyladenosine-3'-phosphate
  modified_base 7: mod_base = OTHER; note = 2'-fluoroguanosine-3'-phosphate
  modified_base 8: mod_base = OTHER; note = 2'-O-methyladenosine-3'-phosphate
  modified_base 9: mod_base = OTHER; note = 2'-fluorocytidine-3'-phosphate
  modified_base 10: mod_base = OTHER; note = 2'-fluorocytidine-3'-phosphate
  modified_base 11: mod_base = OTHER; note = 2'-fluoroadenosine-3'-phosphate
  modified_base 12: mod_base = OTHER; note = 2'-O-methyladenosine-3'-phosphate
  modified_base 13: mod_base = OTHER; note = 2'-O-methylguanosine-3'-phosphate
  modified_base 14: mod_base = OTHER; note = 2'-O-methyladenosine-3'-phosphate
  modified_base 15: mod_base = OTHER; note = 2'-O-methyluridine-3'-phosphate
  modified_base 16: mod_base = OTHER; note = 2'-O-methylguanosine-3'-phosphate
  modified_base 17: mod_base = OTHER; note = 2'-O-methyladenosine-3'-phosphate
  modified_base 18: mod_base = OTHER; note = 2'-O-methyladenosine-3'-phosphate
  modified_base 19: mod_base = OTHER; note = 2'-O-methylguanosine-3'-phosphate
  modified_base 20: mod_base = OTHER; note = 2'-O-methyluridine-3'-phosphate
  modified_base 21: mod_base = OTHER; note = 2'-O-methyluridine-3'-phosphate N-[tris(GalNAc-alkyl)-amidodecanoyl)]-4-hydroxyprolinol (Hyp-(GalNAc-alkyl)3)
tgaagagaccaagatgaagtt

SEQ ID NO: 7193 - RNA, 21 nt, synthetic construct
  source 1..21: mol_type = other RNA
  modified_base 1: mod_base = OTHER; note = 2'-O-methyladenosine-3'-phosphorothioate
  modified_base 2: mod_base = OTHER; note = 2'-O-methylguanosine-3'-phosphorothioate
  modified_base 3: mod_base = OTHER; note = 2'-O-methyladenosine-3'-phosphate
  modified_base 4: mod_base = OTHER; note = 2'-O-methyluridine-3'-phosphate
  modified_base 5: mod_base = OTHER; note = 2'-O-methylguanosine-3'-phosphate
  modified_base 6: mod_base = OTHER; note = 2'-O-methyladenosine-3'-phosphate
  modified_base 7: mod_base = OTHER; note = 2'-fluoroadenosine-3'-phosphate
  modified_base 8: mod_base = OTHER; note = 2'-O-methylguanosine-3'-phosphate
  modified_base 9: mod_base = OTHER; note = 2'-fluorouridine-3'-phosphate
  modified_base 10: mod_base = OTHER; note = 2'-fluorouridine-3'-phosphate
  modified_base 11: mod_base = OTHER; note = 2'-fluorouridine-3'-phosphate
  modified_base 12: mod_base = OTHER; note = 2'-O-methylcytidine-3'-phosphate
  modified_base 13: mod_base = OTHER; note = 2'-O-methylcytidine-3'-phosphate
  modified_base 14: mod_base = OTHER; note = 2'-O-methylcytidine-3'-phosphate
  modified_base 15: mod_base = OTHER; note = 2'-O-methyladenosine-3'-phosphate
  modified_base 16: mod_base = OTHER; note = 2'-O-methylguanosine-3'-phosphate
  modified_base 17: mod_base = OTHER; note = 2'-O-methylguanosine-3'-phosphate
  modified_base 18: mod_base = OTHER; note = 2'-O-methylcytidine-3'-phosphate
  modified_base 19: mod_base = OTHER; note = 2'-O-methyladenosine-3'-phosphate
  modified_base 20: mod_base = OTHER; note = 2'-O-methylcytidine-3'-phosphate
  modified_base 21: mod_base = OTHER; note = 2'-O-methyluridine-3'-phosphate N-[tris(GalNAc-alkyl)-amidodecanoyl)]-4-hydroxyprolinol (Hyp-(GalNAc-alkyl)3)
agatgaagtttcccaggcact

SEQ ID NO: 7194 - RNA, 21 nt, synthetic construct
  source 1..21: mol_type = other RNA
  modified_base 1: mod_base = OTHER; note = 2'-O-methylguanosine-3'-phosphorothioate
  modified_base 2: mod_base = OTHER; note = 2'-O-methyladenosine-3'-phosphorothioate
  modified_base 3: mod_base = OTHER; note = 2'-O-methyladenosine-3'-phosphate
  modified_base 4: mod_base = OTHER; note = 2'-O-methylguanosine-3'-phosphate
  modified_base 5: mod_base = OTHER; note = 2'-O-methyluridine-3'-phosphate
  modified_base 6: mod_base = OTHER; note = 2'-O-methyluridine-3'-phosphate
  modified_base 7: mod_base = OTHER; note = 2'-fluorouridine-3'-phosphate
  modified_base 8: mod_base = OTHER; note = 2'-O-methylcytidine-3'-phosphate
  modified_base 9: mod_base = OTHER; note = 2'-fluorocytidine-3'-phosphate
  modified_base 10: mod_base = OTHER; note = 2'-fluorocytidine-3'-phosphate
  modified_base 11: mod_base = OTHER; note = 2'-fluoroadenosine-3'-phosphate
  modified_base 12: mod_base = OTHER; note = 2'-O-methylguanosine-3'-phosphate
  modified_base 13: mod_base = OTHER; note = 2'-O-methylguanosine-3'-phosphate
  modified_base 14: mod_base = OTHER; note = 2'-O-methylcytidine-3'-phosphate
  modified_base 15: mod_base = OTHER; note = 2'-O-methyladenosine-3'-phosphate
  modified_base 16: mod_base = OTHER; note = 2'-O-methylcytidine-3'-phosphate
  modified_base 17: mod_base = OTHER; note = 2'-O-methyladenosine-3'-phosphate
  modified_base 18: mod_base = OTHER; note = 2'-O-methylguanosine-3'-phosphate
  modified_base 19: mod_base = OTHER; note = 2'-O-methylguanosine-3'-phosphate
  modified_base 20: mod_base = OTHER; note = 2'-O-methylguanosine-3'-phosphate
  modified_base 21: mod_base = OTHER; note = 2'-O-methyluridine-3'-phosphate N-[tris(GalNAc-alkyl)-amidodecanoyl)]-4-hydroxyprolinol (Hyp-(GalNAc-alkyl)3)
gaagtttcccaggcacagggt

SEQ ID NO: 7195 - RNA, 21 nt, synthetic construct
  source 1..21: mol_type = other RNA
  modified_base 1: mod_base = OTHER; note = 2'-O-methyladenosine-3'-phosphorothioate
  modified_base 2: mod_base = OTHER; note = 2'-O-methyladenosine-3'-phosphorothioate
  modified_base 3: mod_base = OTHER; note = 2'-O-methylcytidine-3'-phosphate
  modified_base 4: mod_base = OTHER; note = 2'-O-methylcytidine-3'-phosphate
  modified_base 5: mod_base = OTHER; note = 2'-O-methyladenosine-3'-phosphate
  modified_base 6: mod_base = OTHER; note = 2'-O-methylcytidine-3'-phosphate
  modified_base 7: mod_base = OTHER; note = 2'-fluorocytidine-3'-phosphate
  modified_base 8: mod_base = OTHER; note = 2'-O-methyluridine-3'-phosphate
  modified_base 9: mod_base = OTHER; note = 2'-fluoroguanosine-3'-phosphate
  modified_base 10: mod_base = OTHER; note = 2'-fluoroguanosine-3'-phosphate
  modified_base 11: mod_base = OTHER; note = 2'-fluorocytidine-3'-phosphate
  modified_base 12: mod_base = OTHER; note = 2'-O-methyladenosine-3'-phosphate
  modified_base 13: mod_base = OTHER; note = 2'-O-methyladenosine-3'-phosphate
  modified_base 14: mod_base = OTHER; note = 2'-O-methyluridine-3'-phosphate
  modified_base 15: mod_base = OTHER; note = 2'-O-methyladenosine-3'-phosphate
  modified_base 16: mod_base = OTHER; note = 2'-O-methyluridine-3'-phosphate
  modified_base 17: mod_base = OTHER; note = 2'-O-methylguanosine-3'-phosphate
  modified_base 18: mod_base = OTHER; note = 2'-O-methyladenosine-3'-phosphate
  modified_base 19: mod_base = OTHER; note = 2'-O-methylcytidine-3'-phosphate
  modified_base 20: mod_base = OTHER; note = 2'-O-methyluridine-3'-phosphate
  modified_base 21: mod_base = OTHER; note = 2'-O-methyluridine-3'-phosphate N-[tris(GalNAc-alkyl)-amidodecanoyl)]-4-hydroxyprolinol (Hyp-(GalNAc-alkyl)3)
aaccacctggcaatatgactt

SEQ ID NO: 7196 - RNA, 21 nt, synthetic construct
  source 1..21: mol_type = other RNA
  modified_base 1: mod_base = OTHER; note = 2'-O-methyladenosine-3'-phosphorothioate
  modified_base 2: mod_base = OTHER; note = 2'-O-methylcytidine-3'-phosphorothioate
  modified_base 3: mod_base = OTHER; note = 2'-O-methylcytidine-3'-phosphate
  modified_base 4: mod_base = OTHER; note = 2'-O-methyladenosine-3'-phosphate
  modified_base 5: mod_base = OTHER; note = 2'-O-methylcytidine-3'-phosphate
  modified_base 6: mod_base = OTHER; note = 2'-O-methylcytidine-3'-phosphate
  modified_base 7: mod_base = OTHER; note = 2'-fluorouridine-3'-phosphate
  modified_base 8: mod_base = OTHER; note = 2'-O-methylguanosine-3'-phosphate
  modified_base 9: mod_base = OTHER; note = 2'-fluoroguanosine-3'-phosphate
  modified_base 10: mod_base = OTHER; note = 2'-fluorocytidine-3'-phosphate
  modified_base 11: mod_base = OTHER; note = 2'-fluoroadenosine-3'-phosphate
  modified_base 12: mod_base = OTHER; note = 2'-O-methyladenosine-3'-phosphate
  modified_base 13: mod_base = OTHER; note = 2'-O-methyluridine-3'-phosphate
  modified_base 14: mod_base = OTHER; note = 2'-O-methyladenosine-3'-phosphate
  modified_base 15: mod_base = OTHER; note = 2'-O-methyluridine-3'-phosphate
  modified_base 16: mod_base = OTHER; note = 2'-O-methylguanosine-3'-phosphate
  modified_base 17: mod_base = OTHER; note = 2'-O-methyladenosine-3'-phosphate
  modified_base 18: mod_base = OTHER; note = 2'-O-methylcytidine-3'-phosphate
  modified_base 19: mod_base = OTHER; note = 2'-O-methyluridine-3'-phosphate
  modified_base 20: mod_base = OTHER; note = 2'-O-methylcytidine-3'-phosphate
  modified_base 21: mod_base = OTHER; note = 2'-O-methyluridine-3'-phosphate N-[tris(GalNAc-alkyl)-amidodecanoyl)]-4-hydroxyprolinol (Hyp-(GalNAc-alkyl)3)
accacctggcaatatgactct

SEQ ID NO: 7197 - RNA, 21 nt, synthetic construct
  source 1..21: mol_type = other RNA
  modified_base 1: mod_base = OTHER; note = 2'-O-methylcytidine-3'-phosphorothioate
  modified_base 2: mod_base = OTHER; note = 2'-O-methyladenosine-3'-phosphorothioate
  modified_base 3: mod_base = OTHER; note = 2'-O-methylcytidine-3'-phosphate
  modified_base 4: mod_base = OTHER; note = 2'-O-methylcytidine-3'-phosphate
  modified_base 5: mod_base = OTHER; note = 2'-O-methyluridine-3'-phosphate
  modified_base 6: mod_base = OTHER; note = 2'-O-methylguanosine-3'-phosphate
  modified_base 7: mod_base = OTHER; note = 2'-fluoroguanosine-3'-phosphate
  modified_base 8: mod_base = OTHER; note = 2'-O-methylcytidine-3'-phosphate
  modified_base 9: mod_base = OTHER; note = 2'-fluoroadenosine-3'-phosphate
  modified_base 10: mod_base = OTHER; note = 2'-fluoroadenosine-3'-phosphate
  modified_base 11: mod_base = OTHER; note = 2'-fluorouridine-3'-phosphate
  modified_base 12: mod_base = OTHER; note = 2'-O-methyladenosine-3'-phosphate
  modified_base 13: mod_base = OTHER; note = 2'-O-methyluridine-3'-phosphate
  modified_base 14: mod_base = OTHER; note = 2'-O-methylguanosine-3'-phosphate
  modified_base 15: mod_base = OTHER; note = 2'-O-methyladenosine-3'-phosphate
  modified_base 16: mod_base = OTHER; note = 2'-O-methylcytidine-3'-phosphate
  modified_base 17: mod_base = OTHER; note = 2'-O-methyluridine-3'-phosphate
  modified_base 18: mod_base = OTHER; note = 2'-O-methylcytidine-3'-phosphate
  modified_base 19: mod_base = OTHER; note = 2'-O-methyladenosine-3'-phosphate
  modified_base 20: mod_base = OTHER; note = 2'-O-methylcytidine-3'-phosphate
  modified_base 21: mod_base = OTHER; note = 2'-O-methyluridine-3'-phosphate N-[tris(GalNAc-alkyl)-amidodecanoyl)]-4-hydroxyprolinol (Hyp-(GalNAc-alkyl)3)
cacctggcaatatgactcact

SEQ ID NO: 7198 - RNA, 21 nt, synthetic construct
  source 1..21: mol_type = other RNA
  modified_base 1: mod_base = OTHER; note = 2'-O-methylcytidine-3'-phosphorothioate
  modified_base 2: mod_base = OTHER; note = 2'-O-methylcytidine-3'-phosphorothioate
  modified_base 3: mod_base = OTHER; note = 2'-O-methyluridine-3'-phosphate
  modified_base 4: mod_base = OTHER; note = 2'-O-methylguanosine-3'-phosphate
  modified_base 5: mod_base = OTHER; note = 2'-O-methylguanosine-3'-phosphate
  modified_base 6: mod_base = OTHER; note = 2'-O-methylcytidine-3'-phosphate
  modified_base 7: mod_base = OTHER; note = 2'-fluoroadenosine-3'-phosphate
  modified_base 8: mod_base = OTHER; note = 2'-O-methyladenosine-3'-phosphate
  modified_base 9: mod_base = OTHER; note = 2'-fluorouridine-3'-phosphate
  modified_base 10: mod_base = OTHER; note = 2'-fluoroadenosine-3'-phosphate
  modified_base 11: mod_base = OTHER; note = 2'-fluorouridine-3'-phosphate
  modified_base 12: mod_base = OTHER; note = 2'-O-methylguanosine-3'-phosphate
  modified_base 13: mod_base = OTHER; note = 2'-O-methyladenosine-3'-phosphate
  modified_base 14: mod_base = OTHER; note = 2'-O-methylcytidine-3'-phosphate
  modified_base 15: mod_base = OTHER; note = 2'-O-methyluridine-3'-phosphate
  modified_base 16: mod_base = OTHER; note = 2'-O-methylcytidine-3'-phosphate
  modified_base 17: mod_base = OTHER; note = 2'-O-methyladenosine-3'-phosphate
  modified_base 18: mod_base = OTHER; note = 2'-O-methylcytidine-3'-phosphate
  modified_base 19: mod_base = OTHER; note = 2'-O-methyluridine-3'-phosphate
  modified_base 20: mod_base = OTHER; note = 2'-O-methyluridine-3'-phosphate
  modified_base 21: mod_base = OTHER; note = 2'-O-methyluridine-3'-phosphate N-[tris(GalNAc-alkyl)-amidodecanoyl)]-4-hydroxyprolinol (Hyp-(GalNAc-alkyl)3)
cctggcaatatgactcacttt

SEQ ID NO: 7199 - RNA, 21 nt, synthetic construct
  source 1..21: mol_type = other RNA
  modified_base 1: mod_base = OTHER; note = 2'-O-methyluridine-3'-phosphorothioate
  modified_base 2: mod_base = OTHER; note = 2'-O-methylguanosine-3'-phosphorothioate
  modified_base 3: mod_base = OTHER; note = 2'-O-methylguanosine-3'-phosphate
  modified_base 4: mod_base = OTHER; note = 2'-O-methylcytidine-3'-phosphate
  modified_base 5: mod_base = OTHER; note = 2'-O-methyladenosine-3'-phosphate
  modified_base 6: mod_base = OTHER; note = 2'-O-methyladenosine-3'-phosphate
  modified_base 7: mod_base = OTHER; note = 2'-fluorouridine-3'-phosphate
  modified_base 8: mod_base = OTHER; note = 2'-O-methyladenosine-3'-phosphate
  modified_base 9: mod_base = OTHER; note = 2'-fluorouridine-3'-phosphate
  modified_base 10: mod_base = OTHER; note = 2'-fluoroguanosine-3'-phosphate
  modified_base 11: mod_base = OTHER; note = 2'-fluoroadenosine-3'-phosphate
  modified_base 12: mod_base = OTHER; note = 2'-O-methylcytidine-3'-phosphate
  modified_base 13: mod_base = OTHER; note = 2'-O-methyluridine-3'-phosphate
  modified_base 14: mod_base = OTHER; note = 2'-O-methylcytidine-3'-phosphate
  modified_base 15: mod_base = OTHER; note = 2'-O-methyladenosine-3'-phosphate
  modified_base 16: mod_base = OTHER; note = 2'-O-methylcytidine-3'-phosphate
  modified_base 17: mod_base = OTHER; note = 2'-O-methyluridine-3'-phosphate
  modified_base 18: mod_base = OTHER; note = 2'-O-methyluridine-3'-phosphate
  modified_base 19: mod_base = OTHER; note = 2'-O-methylguanosine-3'-phosphate
  modified_base 20: mod_base = OTHER; note = 2'-O-methyladenosine-3'-phosphate
  modified_base 21: mod_base = OTHER; note = 2'-O-methyluridine-3'-phosphate N-[tris(GalNAc-alkyl)-amidodecanoyl)]-4-hydroxyprolinol (Hyp-(GalNAc-alkyl)3)
tggcaatatgactcacttgat

SEQ ID NO: 7200 - RNA, 21 nt, synthetic construct
  source 1..21: mol_type = other RNA
  modified_base 1: mod_base = OTHER; note = 2'-O-methylguanosine-3'-phosphorothioate
  modified_base 2: mod_base = OTHER; note = 2'-O-methylcytidine-3'-phosphorothioate
  modified_base 3: mod_base = OTHER; note = 2'-O-methyladenosine-3'-phosphate
  modified_base 4: mod_base = OTHER; note = 2'-O-methyladenosine-3'-phosphate
  modified_base 5: mod_base = OTHER; note = 2'-O-methyluridine-3'-phosphate
  modified_base 6: mod_base = OTHER; note = 2'-O-methyladenosine-3'-phosphate
  modified_base 7: mod_base = OTHER; note = 2'-fluorouridine-3'-phosphate
  modified_base 8: mod_base = OTHER; note = 2'-O-methylguanosine-3'-phosphate
  modified_base 9: mod_base = OTHER; note = 2'-fluoroadenosine-3'-phosphate
  modified_base 10: mod_base = OTHER; note = 2'-fluorocytidine-3'-phosphate
  modified_base 11: mod_base = OTHER; note = 2'-fluorouridine-3'-phosphate
  modified_base 12: mod_base = OTHER; note = 2'-O-methylcytidine-3'-phosphate
  modified_base 13: mod_base = OTHER; note = 2'-O-methyladenosine-3'-phosphate
  modified_base 14: mod_base = OTHER; note = 2'-O-methylcytidine-3'-phosphate
  modified_base 15: mod_base = OTHER; note = 2'-O-methyluridine-3'-phosphate
  modified_base 16: mod_base = OTHER; note = 2'-O-methyluridine-3'-phosphate
  modified_base 17: mod_base = OTHER; note = 2'-O-methylguanosine-3'-phosphate
  modified_base 18: mod_base = OTHER; note = 2'-O-methyladenosine-3'-phosphate
  modified_base 19: mod_base = OTHER; note = 2'-O-methylcytidine-3'-phosphate
  modified_base 20: mod_base = OTHER; note = 2'-O-methylcytidine-3'-phosphate
  modified_base 21: mod_base = OTHER; note = 2'-O-methyluridine-3'-phosphate N-[tris(GalNAc-alkyl)-amidodecanoyl)]-4-hydroxyprolinol (Hyp-(GalNAc-alkyl)3)
gcaatatgactcacttgacct

SEQ ID NO: 7201 - RNA, 21 nt, synthetic construct
  source 1..21: mol_type = other RNA
  modified_base 1: mod_base = OTHER; note = 2'-O-methylguanosine-3'-phosphorothioate
  modified_base 2: mod_base = OTHER; note = 2'-O-methylguanosine-3'-phosphorothioate
  modified_base 3: mod_base = OTHER; note = 2'-O-methyladenosine-3'-phosphate
  modified_base 4: mod_base = OTHER; note = 2'-O-methylcytidine-3'-phosphate
  modified_base 5: mod_base = OTHER; note = 2'-O-methylcytidine-3'-phosphate
  modified_base 6: mod_base = OTHER; note = 2'-O-methylcytidine-3'-phosphate
  modified_base 7: mod_base = OTHER; note = 2'-fluoroadenosine-3'-phosphate
  modified_base 8: mod_base = OTHER; note = 2'-O-methyladenosine-3'-phosphate
  modified_base 9: mod_base = OTHER; note = 2'-fluoroadenosine-3'-phosphate
  modified_base 10: mod_base = OTHER; note = 2'-fluorouridine-3'-phosphate
  modified_base 11: mod_base = OTHER; note = 2'-fluoroguanosine-3'-phosphate
  modified_base 12: mod_base = OTHER; note = 2'-O-methylguanosine-3'-phosphate
  modified_base 13: mod_base = OTHER; note = 2'-O-methylguanosine-3'-phosphate
  modified_base 14: mod_base = OTHER; note = 2'-O-methylcytidine-3'-phosphate
  modified_base 15: mod_base = OTHER; note = 2'-O-methyladenosine-3'-phosphate
  modified_base 16: mod_base = OTHER; note = 2'-O-methylcytidine-3'-phosphate
  modified_base 17: mod_base = OTHER; note = 2'-O-methyluridine-3'-phosphate
  modified_base 18: mod_base = OTHER; note = 2'-O-methyluridine-3'-phosphate
  modified_base 19: mod_base = OTHER; note = 2'-O-methyluridine-3'-phosphate
  modified_base 20: mod_base = OTHER; note = 2'-O-methylcytidine-3'-phosphate
  modified_base 21: mod_base = OTHER; note = 2'-O-methyluridine-3'-phosphate N-[tris(GalNAc-alkyl)-amidodecanoyl)]-4-hydroxyprolinol (Hyp-(GalNAc-alkyl)3)
ggacccaaatgggcactttct

SEQ ID NO: 7202 - RNA, 21 nt, synthetic construct
  source 1..21: mol_type = other RNA
  modified_base 1: mod_base = OTHER; note = 2'-O-methyluridine-3'-phosphorothioate
  modified_base 2: mod_base = OTHER; note = 2'-O-methylguanosine-3'-phosphorothioate
  modified_base 3: mod_base = OTHER; note = 2'-O-methylguanosine-3'-phosphate
  modified_base 4: mod_base = OTHER; note = 2'-O-methylguanosine-3'-phosphate
  modified_base 5: mod_base = OTHER; note = 2'-O-methylcytidine-3'-phosphate
  modified_base 6: mod_base = OTHER; note = 2'-O-methyladenosine-3'-phosphate
  modified_base 7: mod_base = OTHER; note = 2'-fluorocytidine-3'-phosphate
  modified_base 8: mod_base = OTHER; note = 2'-O-methyluridine-3'-phosphate
  modified_base 9: mod_base = OTHER; note = 2'-fluorouridine-3'-phosphate
  modified_base 10: mod_base = OTHER; note = 2'-fluorouridine-3'-phosphate
  modified_base 11: mod_base = OTHER; note = 2'-fluorocytidine-3'-phosphate
  modified_base 12: mod_base = OTHER; note = 2'-O-methyluridine-3'-phosphate
  modified_base 13: mod_base = OTHER; note = 2'-O-methyluridine-3'-phosphate
  modified_base 14: mod_base = OTHER; note = 2'-O-methylguanosine-3'-phosphate
  modified_base 15: mod_base = OTHER; note = 2'-O-methyluridine-3'-phosphate
  modified_base 16: mod_base = OTHER; note = 2'-O-methylcytidine-3'-phosphate
  modified_base 17: mod_base = OTHER; note = 2'-O-methyluridine-3'-phosphate
  modified_base 18: mod_base = OTHER; note = 2'-O-methylguanosine-3'-phosphate
  modified_base 19: mod_base = OTHER; note = 2'-O-methyladenosine-3'-phosphate
  modified_base 20: mod_base = OTHER; note = 2'-O-methylguanosine-3'-phosphate
  modified_base 21: mod_base = OTHER; note = 2'-O-methyluridine-3'-phosphate N-[tris(GalNAc-alkyl)-amidodecanoyl)]-4-hydroxyprolinol (Hyp-(GalNAc-alkyl)3)
tgggcactttcttgtctgagt

SEQ ID NO: 7203 - RNA, 21 nt, synthetic construct
  source 1..21: mol_type = other RNA
  modified_base 1: mod_base = OTHER; note = 2'-O-methylguanosine-3'-phosphorothioate
  modified_base 2: mod_base = OTHER; note = 2'-O-methylguanosine-3'-phosphorothioate
  modified_base 3: mod_base = OTHER; note = 2'-O-methylcytidine-3'-phosphate
  modified_base 4: mod_base = OTHER; note = 2'-O-methyladenosine-3'-phosphate
  modified_base 5: mod_base = OTHER; note = 2'-O-methylcytidine-3'-phosphate
  modified_base 6: mod_base = OTHER; note = 2'-O-methyluridine-3'-phosphate
  modified_base 7: mod_base = OTHER; note = 2'-fluorouridine-3'-phosphate
  modified_base 8: mod_base = OTHER; note = 2'-O-methyluridine-3'-phosphate
  modified_base 9: mod_base = OTHER; note = 2'-fluorocytidine-3'-phosphate
  modified_base 10: mod_base = OTHER; note = 2'-fluorouridine-3'-phosphate
  modified_base 11: mod_base = OTHER; note = 2'-fluorouridine-3'-phosphate
  modified_base 12: mod_base = OTHER; note = 2'-O-methylguanosine-3'-phosphate
  modified_base 13: mod_base = OTHER; note = 2'-O-methyluridine-3'-phosphate
  modified_base 14: mod_base = OTHER; note = 2'-O-methylcytidine-3'-phosphate
  modified_base 15: mod_base = OTHER; note = 2'-O-methyluridine-3'-phosphate
  modified_base 16: mod_base = OTHER; note = 2'-O-methylguanosine-3'-phosphate
  modified_base 17: mod_base = OTHER; note = 2'-O-methyladenosine-3'-phosphate
  modified_base 18: mod_base = OTHER; note = 2'-O-methylguanosine-3'-phosphate
  modified_base 19: mod_base = OTHER; note = 2'-O-methyladenosine-3'-phosphate
  modified_base 20: mod_base = OTHER; note = 2'-O-methylcytidine-3'-phosphate
  modified_base 21: mod_base = OTHER; note = 2'-O-methyluridine-3'-phosphate N-[tris(GalNAc-alkyl)-amidodecanoyl)]-4-hydroxyprolinol (Hyp-(GalNAc-alkyl)3)
ggcactttcttgtctgagact

SEQ ID NO: 7204 - RNA, 21 nt, synthetic construct
  source 1..21: mol_type = other RNA
  modified_base 1: mod_base = OTHER; note = 2'-O-methylcytidine-3'-phosphorothioate
  modified_base 2: mod_base = OTHER; note = 2'-O-methyladenosine-3'-phosphorothioate
  modified_base 3: mod_base = OTHER; note = 2'-O-methylcytidine-3'-phosphate
  modified_base 4: mod_base = OTHER; note = 2'-O-methyluridine-3'-phosphate
  modified_base 5: mod_base = OTHER; note = 2'-O-methyluridine-3'-phosphate
  modified_base 6: mod_base = OTHER; note = 2'-O-methyluridine-3'-phosphate
  modified_base 7: mod_base = OTHER; note = 2'-fluorocytidine-3'-phosphate
  modified_base 8: mod_base = OTHER; note = 2'-O-methyluridine-3'-phosphate
  modified_base 9: mod_base = OTHER; note = 2'-fluorouridine-3'-phosphate
  modified_base 10: mod_base = OTHER; note = 2'-fluoroguanosine-3'-phosphate
  modified_base 11: mod_base = OTHER; note = 2'-fluorouridine-3'-phosphate
  modified_base 12: mod_base = OTHER; note = 2'-O-methylcytidine-3'-phosphate
  modified_base 13: mod_base = OTHER; note = 2'-O-methyluridine-3'-phosphate
  modified_base 14: mod_base = OTHER; note = 2'-O-methylguanosine-3'-phosphate
  modified_base 15: mod_base = OTHER; note = 2'-O-methyladenosine-3'-phosphate
  modified_base 16: mod_base = OTHER; note = 2'-O-methylguanosine-3'-phosphate
  modified_base 17: mod_base = OTHER; note = 2'-O-methyladenosine-3'-phosphate
  modified_base 18: mod_base = OTHER; note = 2'-O-methylcytidine-3'-phosphate
  modified_base 19: mod_base = OTHER; note = 2'-O-methyluridine-3'-phosphate
  modified_base 20: mod_base = OTHER; note = 2'-O-methylcytidine-3'-phosphate
  modified_base 21: mod_base = OTHER; note = 2'-O-methyluridine-3'-phosphate N-[tris(GalNAc-alkyl)-amidodecanoyl)]-4-hydroxyprolinol (Hyp-(GalNAc-alkyl)3)
cactttcttgtctgagactct

SEQ ID NO: 7205 - RNA, 21 nt, synthetic construct
  source 1..21: mol_type = other RNA
  modified_base 1: mod_base = OTHER; note = 2'-O-methylcytidine-3'-phosphorothioate
  modified_base 2: mod_base = OTHER; note = 2'-O-methyluridine-3'-phosphorothioate
  modified_base 3: mod_base = OTHER; note = 2'-O-methyluridine-3'-phosphate
  modified_base 4: mod_base = OTHER; note = 2'-O-methyluridine-3'-phosphate
  modified_base 5: mod_base = OTHER; note = 2'-O-methylcytidine-3'-phosphate
  modified_base 6: mod_base = OTHER; note = 2'-O-methyluridine-3'-phosphate
  modified_base 7: mod_base = OTHER; note = 2'-fluorouridine-3'-phosphate
  modified_base 8: mod_base = OTHER; note = 2'-O-methylguanosine-3'-phosphate
  modified_base 9: mod_base = OTHER; note = 2'-fluorouridine-3'-phosphate
  modified_base 10: mod_base = OTHER; note = 2'-fluorocytidine-3'-phosphate
  modified_base 11: mod_base = OTHER; note = 2'-fluorouridine-3'-phosphate
  modified_base 12: mod_base = OTHER; note = 2'-O-methylguanosine-3'-phosphate
  modified_base 13: mod_base = OTHER; note = 2'-O-methyladenosine-3'-phosphate
  modified_base 14: mod_base = OTHER; note = 2'-O-methylguanosine-3'-phosphate
  modified_base 15: mod_base = OTHER; note = 2'-O-methyladenosine-3'-phosphate
  modified_base 16: mod_base = OTHER; note = 2'-O-methylcytidine-3'-phosphate
  modified_base 17: mod_base = OTHER; note = 2'-O-methyluridine-3'-phosphate
  modified_base 18: mod_base = OTHER; note = 2'-O-methylcytidine-3'-phosphate
  modified_base 19: mod_base = OTHER; note = 2'-O-methyluridine-3'-phosphate
  modified_base 20: mod_base = OTHER; note = 2'-O-methylguanosine-3'-phosphate
  modified_base 21: mod_base = OTHER; note = 2'-O-methyluridine-3'-phosphate N-[tris(GalNAc-alkyl)-amidodecanoyl)]-4-hydroxyprolinol (Hyp-(GalNAc-alkyl)3)
ctttcttgtctgagactctgt

SEQ ID NO: 7206 - RNA, 21 nt, synthetic construct
  source 1..21: mol_type = other RNA
  modified_base 1: mod_base = OTHER; note = 2'-O-methyluridine-3'-phosphorothioate
  modified_base 2: mod_base = OTHER; note = 2'-O-methyluridine-3'-phosphorothioate
  modified_base 3: mod_base = OTHER; note = 2'-O-methylcytidine-3'-phosphate
  modified_base 4: mod_base = OTHER; note = 2'-O-methyluridine-3'-phosphate
  modified_base 5: mod_base = OTHER; note = 2'-O-methyluridine-3'-phosphate
  modified_base 6: mod_base = OTHER; note = 2'-O-methylguanosine-3'-phosphate
  modified_base 7: mod_base = OTHER; note = 2'-fluorouridine-3'-phosphate
  modified_base 8: mod_base = OTHER; note = 2'-O-methylcytidine-3'-phosphate
  modified_base 9: mod_base = OTHER; note = 2'-fluorouridine-3'-phosphate
  modified_base 10: mod_base = OTHER; note = 2'-fluoroguanosine-3'-phosphate
  modified_base 11: mod_base = OTHER; note = 2'-fluoroadenosine-3'-phosphate
  modified_base 12: mod_base = OTHER; note = 2'-O-methylguanosine-3'-phosphate
  modified_base 13: mod_base = OTHER; note = 2'-O-methyladenosine-3'-phosphate
  modified_base 14: mod_base = OTHER; note = 2'-O-methylcytidine-3'-phosphate
  modified_base 15: mod_base = OTHER; note = 2'-O-methyluridine-3'-phosphate
  modified_base 16: mod_base = OTHER; note = 2'-O-methylcytidine-3'-phosphate
  modified_base 17: mod_base = OTHER; note = 2'-O-methyluridine-3'-phosphate
  modified_base 18: mod_base = OTHER; note = 2'-O-methylguanosine-3'-phosphate
  modified_base 19: mod_base = OTHER; note = 2'-O-methylguanosine-3'-phosphate
  modified_base 20: mod_base = OTHER; note = 2'-O-methylcytidine-3'-phosphate
  modified_base 21: mod_base = OTHER; note = 2'-O-methyluridine-3'-phosphate N-[tris(GalNAc-alkyl)-amidodecanoyl)]-4-hydroxyprolinol (Hyp-(GalNAc-alkyl)3)
ttcttgtctgagactctggct

SEQ ID NO: 7207 - RNA, 21 nt, synthetic construct
  source 1..21: mol_type = other RNA
  modified_base 1: mod_base = OTHER; note = 2'-O-methylcytidine-3'-phosphorothioate
  modified_base 2: mod_base = OTHER; note = 2'-O-methyluridine-3'-phosphorothioate
  modified_base 3: mod_base = OTHER; note = 2'-O-methyluridine-3'-phosphate
  modified_base 4: mod_base = OTHER; note = 2'-O-methylguanosine-3'-phosphate
  modified_base 5: mod_base = OTHER; note = 2'-O-methyluridine-3'-phosphate
  modified_base 6: mod_base = OTHER; note = 2'-O-methylcytidine-3'-phosphate
  modified_base 7: mod_base = OTHER; note = 2'-fluorouridine-3'-phosphate
  modified_base 8: mod_base = OTHER; note = 2'-O-methylguanosine-3'-phosphate
  modified_base 9: mod_base = OTHER; note = 2'-fluoroadenosine-3'-phosphate
  modified_base 10: mod_base = OTHER; note = 2'-fluoroguanosine-3'-phosphate
  modified_base 11: mod_base = OTHER; note = 2'-fluoroadenosine-3'-phosphate
  modified_base 12: mod_base = OTHER; note = 2'-O-methylcytidine-3'-phosphate
  modified_base 13: mod_base = OTHER; note = 2'-O-methyluridine-3'-phosphate
  modified_base 14: mod_base = OTHER; note = 2'-O-methylcytidine-3'-phosphate
  modified_base 15: mod_base = OTHER; note = 2'-O-methyluridine-3'-phosphate
  modified_base 16: mod_base = OTHER; note = 2'-O-methylguanosine-3'-phosphate
  modified_base 17: mod_base = OTHER; note = 2'-O-methylguanosine-3'-phosphate
  modified_base 18: mod_base = OTHER; note = 2'-O-methylcytidine-3'-phosphate
  modified_base 19: mod_base = OTHER; note = 2'-O-methyluridine-3'-phosphate
  modified_base 20: mod_base = OTHER; note = 2'-O-methyluridine-3'-phosphate
  modified_base 21: mod_base = OTHER; note = 2'-O-methyluridine-3'-phosphate N-[tris(GalNAc-alkyl)-amidodecanoyl)]-4-hydroxyprolinol (Hyp-(GalNAc-alkyl)3)
cttgtctgagactctggcttt

SEQ ID NO: 7208 - RNA, 21 nt, synthetic construct
  source 1..21: mol_type = other RNA
  modified_base 1: mod_base = OTHER; note = 2'-O-methyluridine-3'-phosphorothioate
  modified_base 2: mod_base = OTHER; note = 2'-O-methyladenosine-3'-phosphorothioate
  modified_base 3: mod_base = OTHER; note = 2'-O-methyluridine-3'-phosphate
  modified_base 4: mod_base = OTHER; note = 2'-O-methyluridine-3'-phosphate
  modified_base 5: mod_base = OTHER; note = 2'-O-methylcytidine-3'-phosphate
  modified_base 6: mod_base = OTHER; note = 2'-O-methylcytidine-3'-phosphate
  modified_base 7: mod_base = OTHER; note = 2'-fluoroadenosine-3'-phosphate
  modified_base 8: mod_base = OTHER; note = 2'-O-methylguanosine-3'-phosphate
  modified_base 9: mod_base = OTHER; note = 2'-fluoroguanosine-3'-phosphate
  modified_base 10: mod_base = OTHER; note = 2'-fluorouridine-3'-phosphate
  modified_base 11: mod_base = OTHER; note = 2'-fluorouridine-3'-phosphate
  modified_base 12: mod_base = OTHER; note = 2'-O-methylguanosine-3'-phosphate
  modified_base 13: mod_base = OTHER; note = 2'-O-methylguanosine-3'-phosphate
  modified_base 14: mod_base = OTHER; note = 2'-O-methylcytidine-3'-phosphate
  modified_base 15: mod_base = OTHER; note = 2'-O-methyluridine-3'-phosphate
  modified_base 16: mod_base = OTHER; note = 2'-O-methylguanosine-3'-phosphate
  modified_base 17: mod_base = OTHER; note = 2'-O-methyladenosine-3'-phosphate
  modified_base 18: mod_base = OTHER; note = 2'-O-methyluridine-3'-phosphate
  modified_base 19: mod_base = OTHER; note = 2'-O-methylguanosine-3'-phosphate
  modified_base 20: mod_base = OTHER; note = 2'-O-methyluridine-3'-phosphate
  modified_base 21: mod_base = OTHER; note = 2'-O-methyluridine-3'-phosphate N-[tris(GalNAc-alkyl)-amidodecanoyl)]-4-hydroxyprolinol (Hyp-(GalNAc-alkyl)3)
tattccaggttggctgatgtt

SEQ ID NO: 7209 - RNA, 21 nt, synthetic construct
  source 1..21: mol_type = other RNA
  modified_base 1: mod_base = OTHER; note = 2'-O-methylcytidine-3'-phosphorothioate
  modified_base 2: mod_base = OTHER; note = 2'-O-methyluridine-3'-phosphorothioate
  modified_base 3: mod_base = OTHER; note = 2'-O-methylcytidine-3'-phosphate
  modified_base 4: mod_base = OTHER; note = 2'-O-methyluridine-3'-phosphate
  modified_base 5: mod_base = OTHER; note = 2'-O-methylcytidine-3'-phosphate
  modified_base 6: mod_base = OTHER; note = 2'-O-methyluridine-3'-phosphate
  modified_base 7: mod_base = OTHER; note = 2'-fluorocytidine-3'-phosphate
  modified_base 8: mod_base = OTHER; note = 2'-O-methylcytidine-3'-phosphate
  modified_base 9: mod_base = OTHER; note = 2'-fluorouridine-3'-phosphate
  modified_base 10: mod_base = OTHER; note = 2'-fluorocytidine-3'-phosphate
  modified_base 11: mod_base = OTHER; note = 2'-fluorouridine-3'-phosphate
  modified_base 12: mod_base = OTHER; note = 2'-O-methyladenosine-3'-phosphate
  modified_base 13: mod_base = OTHER; note = 2'-O-methylcytidine-3'-phosphate
  modified_base 14: mod_base = OTHER; note = 2'-O-methylcytidine-3'-phosphate
  modified_base 15: mod_base = OTHER; note = 2'-O-methyluridine-3'-phosphate
  modified_base 16: mod_base = OTHER; note = 2'-O-methylguanosine-3'-phosphate
  modified_base 17: mod_base = OTHER; note = 2'-O-methylguanosine-3'-phosphate
  modified_base 18: mod_base = OTHER; note = 2'-O-methyladenosine-3'-phosphate
  modified_base 19: mod_base = OTHER; note = 2'-O-methyluridine-3'-phosphate
  modified_base 20: mod_base = OTHER; note = 2'-O-methylcytidine-3'-phosphate
  modified_base 21: mod_base = OTHER; note = 2'-O-methyluridine-3'-phosphate N-[tris(GalNAc-alkyl)-amidodecanoyl)]-4-hydroxyprolinol (Hyp-(GalNAc-alkyl)3)
ctctctcctctacctggatct

SEQ ID NO: 7210 - RNA, 21 nt, synthetic construct
  source 1..21: mol_type = other RNA
  modified_base 1: mod_base = OTHER; note = 2'-O-methyluridine-3'-phosphorothioate
  modified_base 2: mod_base = OTHER; note = 2'-O-methyluridine-3'-phosphorothioate
  modified_base 3: mod_base = OTHER; note = 2'-O-methyluridine-3'-phosphate
  modified_base 4: mod_base = OTHER; note = 2'-O-methylcytidine-3'-phosphate
  modified_base 5: mod_base = OTHER; note = 2'-O-methylcytidine-3'-phosphate
  modified_base 6: mod_base = OTHER; note = 2'-O-methyluridine-3'-phosphate
  modified_base 7: mod_base = OTHER; note = 2'-fluoroguanosine-3'-phosphate
  modified_base 8: mod_base = OTHER; note = 2'-O-methylcytidine-3'-phosphate
  modified_base 9: mod_base = OTHER; note = 2'-fluorocytidine-3'-phosphate
  modified_base 10: mod_base = OTHER; note = 2'-fluorocytidine-3'-phosphate
  modified_base 11: mod_base = OTHER; note = 2'-fluorouridine-3'-phosphate
  modified_base 12: mod_base = OTHER; note = 2'-O-methyladenosine-3'-phosphate
  modified_base 13: mod_base = OTHER; note = 2'-O-methyladenosine-3'-phosphate
  modified_base 14: mod_base = OTHER; note = 2'-O-methylguanosine-3'-phosphate
  modified_base 15: mod_base = OTHER; note = 2'-O-methyluridine-3'-phosphate
  modified_base 16: mod_base = OTHER; note = 2'-O-methylcytidine-3'-phosphate
  modified_base 17: mod_base = OTHER; note = 2'-O-methylcytidine-3'-phosphate
  modified_base 18: mod_base = OTHER; note = 2'-O-methyluridine-3'-phosphate
  modified_base 19: mod_base = OTHER; note = 2'-O-methylguanosine-3'-phosphate
  modified_base 20: mod_base = OTHER; note = 2'-O-methyluridine-3'-phosphate
  modified_base 21: mod_base = OTHER; note = 2'-O-methyluridine-3'-phosphate N-[tris(GalNAc-alkyl)-amidodecanoyl)]-4-hydroxyprolinol (Hyp-(GalNAc-alkyl)3)
tttcctgccctaagtcctgtt

SEQ ID NO: 7211 - RNA, 21 nt, synthetic construct
  source 1..21: mol_type = other RNA
  modified_base 1: mod_base = OTHER; note = 2'-O-methyladenosine-3'-phosphorothioate
  modified_base 2: mod_base = OTHER; note = 2'-O-methylguanosine-3'-phosphorothioate
  modified_base 3: mod_base = OTHER; note = 2'-O-methyladenosine-3'-phosphate
  modified_base 4: mod_base = OTHER; note = 2'-O-methyladenosine-3'-phosphate
  modified_base 5: mod_base = OTHER; note = 2'-O-methylguanosine-3'-phosphate
  modified_base 6: mod_base = OTHER; note = 2'-O-methyladenosine-3'-phosphate
  modified_base 7: mod_base = OTHER; note = 2'-fluorouridine-3'-phosphate
  modified_base 8: mod_base = OTHER; note = 2'-O-methylguanosine-3'-phosphate
  modified_base 9: mod_base = OTHER; note = 2'-fluorouridine-3'-phosphate
  modified_base 10: mod_base = OTHER; note = 2'-fluorocytidine-3'-phosphate
  modified_base 11: mod_base = OTHER; note = 2'-fluoroadenosine-3'-phosphate
  modified_base 12: mod_base = OTHER; note = 2'-O-methylguanosine-3'-phosphate
  modified_base 13: mod_base = OTHER; note = 2'-O-methylguanosine-3'-phosphate
  modified_base 14: mod_base = OTHER; note = 2'-O-methylguanosine-3'-phosphate
  modified_base 15: mod_base = OTHER; note = 2'-O-methyladenosine-3'-phosphate
  modified_base 16: mod_base = OTHER; note = 2'-O-methylcytidine-3'-phosphate
  modified_base 17: mod_base = OTHER; note = 2'-O-methyluridine-3'-phosphate
  modified_base 18: mod_base = OTHER; note = 2'-O-methyladenosine-3'-phosphate
  modified_base 19: mod_base = OTHER; note = 2'-O-methylguanosine-3'-phosphate
  modified_base 20: mod_base = OTHER; note = 2'-O-methylguanosine-3'-phosphate
  modified_base 21: mod_base = OTHER; note = 2'-O-methyluridine-3'-phosphate N-[tris(GalNAc-alkyl)-amidodecanoyl)]-4-hydroxyprolinol (Hyp-(GalNAc-alkyl)3)
agaagatgtcagggactaggt

SEQ ID NO: 7212 - RNA, 21 nt, synthetic construct
  source 1..21: mol_type = other RNA
  modified_base 1: mod_base = OTHER; note = 2'-O-methyladenosine-3'-phosphorothioate
  modified_base 2: mod_base = OTHER; note = 2'-O-methyladenosine-3'-phosphorothioate
  modified_base 3: mod_base = OTHER; note = 2'-O-methylguanosine-3'-phosphate
  modified_base 4: mod_base = OTHER; note = 2'-O-methyladenosine-3'-phosphate
  modified_base 5: mod_base = OTHER; note = 2'-O-methyluridine-3'-phosphate
  modified_base 6: mod_base = OTHER; note = 2'-O-methylguanosine-3'-phosphate
  modified_base 7: mod_base = OTHER; note = 2'-fluorouridine-3'-phosphate
  modified_base 8: mod_base = OTHER; note = 2'-O-methylcytidine-3'-phosphate
  modified_base 9: mod_base = OTHER; note = 2'-fluoroadenosine-3'-phosphate
  modified_base 10: mod_base = OTHER; note = 2'-fluoroguanosine-3'-phosphate
  modified_base 11: mod_base = OTHER; note = 2'-fluoroguanosine-3'-phosphate
  modified_base 12: mod_base = OTHER; note = 2'-O-methylguanosine-3'-phosphate
  modified_base 13: mod_base = OTHER; note = 2'-O-methyladenosine-3'-phosphate
  modified_base 14: mod_base = OTHER; note = 2'-O-methylcytidine-3'-phosphate
  modified_base 15: mod_base = OTHER; note = 2'-O-methyluridine-3'-phosphate
  modified_base 16: mod_base = OTHER; note = 2'-O-methyladenosine-3'-phosphate
  modified_base 17: mod_base = OTHER; note = 2'-O-methylguanosine-3'-phosphate
  modified_base 18: mod_base = OTHER; note = 2'-O-methylguanosine-3'-phosphate
  modified_base 19: mod_base = OTHER; note = 2'-O-methylguanosine-3'-phosphate
  modified_base 20: mod_base = OTHER; note = 2'-O-methyladenosine-3'-phosphate
  modified_base 21: mod_base = OTHER; note = 2'-O-methyluridine-3'-phosphate N-[tris(GalNAc-alkyl)-amidodecanoyl)]-4-hydroxyprolinol (Hyp-(GalNAc-alkyl)3)
aagatgtcagggactagggat

SEQ ID NO: 7213 - RNA, 21 nt, synthetic construct
  source 1..21: mol_type = other RNA
  modified_base 1: mod_base = OTHER; note = 2'-O-methyladenosine-3'-phosphorothioate
  modified_base 2: mod_base = OTHER; note = 2'-O-methylguanosine-3'-phosphorothioate
  modified_base 3: mod_base = OTHER; note = 2'-O-methylguanosine-3'-phosphate
  modified_base 4: mod_base = OTHER; note = 2'-O-methyladenosine-3'-phosphate
  modified_base 5: mod_base = OTHER; note = 2'-O-methylguanosine-3'-phosphate
  modified_base 6: mod_base = OTHER; note = 2'-O-methylguanosine-3'-phosphate
  modified_base 7: mod_base = OTHER; note = 2'-fluoroadenosine-3'-phosphate
  modified_base 8: mod_base = OTHER; note = 2'-O-methyladenosine-3'-phosphate
  modified_base 9: mod_base = OTHER; note = 2'-fluoroguanosine-3'-phosphate
  modified_base 10: mod_base = OTHER; note = 2'-fluorocytidine-3'-phosphate
  modified_base 11: mod_base = OTHER; note = 2'-fluoroadenosine-3'-phosphate
  modified_base 12: mod_base = OTHER; note = 2'-O-methylguanosine-3'-phosphate
  modified_base 13: mod_base = OTHER; note = 2'-O-methyladenosine-3'-phosphate
  modified_base 14: mod_base = OTHER; note = 2'-O-methyluridine-3'-phosphate
  modified_base 15: mod_base = OTHER; note = 2'-O-methyladenosine-3'-phosphate
  modified_base 16: mod_base = OTHER; note = 2'-O-methylguanosine-3'-phosphate
  modified_base 17: mod_base = OTHER; note = 2'-O-methyladenosine-3'-phosphate
  modified_base 18: mod_base = OTHER; note = 2'-O-methyluridine-3'-phosphate
  modified_base 19: mod_base = OTHER; note = 2'-O-methylguanosine-3'-phosphate
  modified_base 20: mod_base = OTHER; note = 2'-O-methylguanosine-3'-phosphate
  modified_base 21: mod_base = OTHER; note = 2'-O-methyluridine-3'-phosphate N-[tris(GalNAc-alkyl)-amidodecanoyl)]-4-hydroxyprolinol (Hyp-(GalNAc-alkyl)3)
aggaggaagcagatagatggt

SEQ ID NO: 7214 - RNA, 21 nt, synthetic construct
  source 1..21: mol_type = other RNA
  modified_base 1: mod_base = OTHER; note = 2'-O-methylguanosine-3'-phosphorothioate
  modified_base 2: mod_base = OTHER; note = 2'-O-methyladenosine-3'-phosphorothioate
  modified_base 3: mod_base = OTHER; note = 2'-O-methylguanosine-3'-phosphate
  modified_base 4: mod_base = OTHER; note = 2'-O-methylguanosine-3'-phosphate
  modified_base 5: mod_base = OTHER; note = 2'-O-methyladenosine-3'-phosphate
  modified_base 6: mod_base = OTHER; note = 2'-O-methyladenosine-3'-phosphate
  modified_base 7: mod_base = OTHER; note = 2'-fluoroguanosine-3'-phosphate
  modified_base 8: mod_base = OTHER; note = 2'-O-methylcytidine-3'-phosphate
  modified_base 9: mod_base = OTHER; note = 2'-fluoroadenosine-3'-phosphate
  modified_base 10: mod_base = OTHER; note = 2'-fluoroguanosine-3'-phosphate
  modified_base 11: mod_base = OTHER; note = 2'-fluoroadenosine-3'-phosphate
  modified_base 12: mod_base = OTHER; note = 2'-O-methyluridine-3'-phosphate
  modified_base 13: mod_base = OTHER; note = 2'-O-methyladenosine-3'-phosphate
  modified_base 14: mod_base = OTHER; note = 2'-O-methylguanosine-3'-phosphate
  modified_base 15: mod_base = OTHER; note = 2'-O-methyladenosine-3'-phosphate
  modified_base 16: mod_base = OTHER; note = 2'-O-methyluridine-3'-phosphate
  modified_base 17: mod_base = OTHER; note = 2'-O-methylguanosine-3'-phosphate
  modified_base 18: mod_base = OTHER; note = 2'-O-methylguanosine-3'-phosphate
  modified_base 19: mod_base = OTHER; note = 2'-O-methyluridine-3'-phosphate
  modified_base 20: mod_base = OTHER; note = 2'-O-methylcytidine-3'-phosphate
  modified_base 21: mod_base = OTHER; note = 2'-O-methyluridine-3'-phosphate N-[tris(GalNAc-alkyl)-amidodecanoyl)]-4-hydroxyprolinol (Hyp-(GalNAc-alkyl)3)
gaggaagcagatagatggtct

SEQ ID NO: 7215 - RNA, 21 nt, synthetic construct
  source 1..21: mol_type = other RNA
  modified_base 1: mod_base = OTHER; note = 2'-O-methyladenosine-3'-phosphorothioate
  modified_base 2: mod_base = OTHER; note = 2'-O-methylguanosine-3'-phosphorothioate
  modified_base 3: mod_base = OTHER; note = 2'-O-methylguanosine-3'-phosphate
  modified_base 4: mod_base = OTHER; note = 2'-O-methyladenosine-3'-phosphate
  modified_base 5: mod_base = OTHER; note = 2'-O-methyladenosine-3'-phosphate
  modified_base 6: mod_base = OTHER; note = 2'-O-methylguanosine-3'-phosphate
  modified_base 7: mod_base = OTHER; note = 2'-fluorocytidine-3'-phosphate
  modified_base 8: mod_base = OTHER; note = 2'-O-methyladenosine-3'-phosphate
  modified_base 9: mod_base = OTHER; note = 2'-fluoroguanosine-3'-phosphate
  modified_base 10: mod_base = OTHER; note = 2'-fluoroadenosine-3'-phosphate
  modified_base 11: mod_base = OTHER; note = 2'-fluorouridine-3'-phosphate
  modified_base 12: mod_base = OTHER; note = 2'-O-methyladenosine-3'-phosphate
  modified_base 13: mod_base = OTHER; note = 2'-O-methylguanosine-3'-phosphate
  modified_base 14: mod_base = OTHER; note = 2'-O-methyladenosine-3'-phosphate
  modified_base 15: mod_base = OTHER; note = 2'-O-methyluridine-3'-phosphate
  modified_base 16: mod_base = OTHER; note = 2'-O-methylguanosine-3'-phosphate
  modified_base 17: mod_base = OTHER; note = 2'-O-methylguanosine-3'-phosphate
  modified_base 18: mod_base = OTHER; note = 2'-O-methyluridine-3'-phosphate
  modified_base 19: mod_base = OTHER; note = 2'-O-methylcytidine-3'-phosphate
  modified_base 20: mod_base = OTHER; note = 2'-O-methylcytidine-3'-phosphate
  modified_base 21: mod_base = OTHER; note = 2'-O-methyluridine-3'-phosphate N-[tris(GalNAc-alkyl)-amidodecanoyl)]-4-hydroxyprolinol (Hyp-(GalNAc-alkyl)3)
aggaagcagatagatggtcct

SEQ ID NO: 7216 - RNA, 21 nt, synthetic construct
  source 1..21: mol_type = other RNA
  modified_base 1: mod_base = OTHER; note = 2'-O-methyladenosine-3'-phosphorothioate
  modified_base 2: mod_base = OTHER; note = 2'-O-methyladenosine-3'-phosphorothioate
  modified_base 3: mod_base = OTHER; note = 2'-O-methylguanosine-3'-phosphate
  modified_base 4: mod_base = OTHER; note = 2'-O-methylcytidine-3'-phosphate
  modified_base 5: mod_base = OTHER; note = 2'-O-methyladenosine-3'-phosphate
  modified_base 6: mod_base = OTHER; note = 2'-O-methylguanosine-3'-phosphate
  modified_base 7: mod_base = OTHER; note = 2'-fluoroadenosine-3'-phosphate
  modified_base 8: mod_base = OTHER; note = 2'-O-methyluridine-3'-phosphate
  modified_base 9: mod_base = OTHER; note = 2'-fluoroadenosine-3'-phosphate
  modified_base 10: mod_base = OTHER; note = 2'-fluoroguanosine-3'-phosphate
  modified_base 11: mod_base = OTHER; note = 2'-fluoroadenosine-3'-phosphate
  modified_base 12: mod_base = OTHER; note = 2'-O-methyluridine-3'-phosphate
  modified_base 13: mod_base = OTHER; note = 2'-O-methylguanosine-3'-phosphate
  modified_base 14: mod_base = OTHER; note = 2'-O-methylguanosine-3'-phosphate
  modified_base 15: mod_base = OTHER; note = 2'-O-methyluridine-3'-phosphate
  modified_base 16: mod_base = OTHER; note = 2'-O-methylcytidine-3'-phosphate
  modified_base 17: mod_base = OTHER; note = 2'-O-methylcytidine-3'-phosphate
  modified_base 18: mod_base = OTHER; note = 2'-O-methyladenosine-3'-phosphate
  modified_base 19: mod_base = OTHER; note = 2'-O-methylguanosine-3'-phosphate
  modified_base 20: mod_base = OTHER; note = 2'-O-methylcytidine-3'-phosphate
  modified_base 21: mod_base = OTHER; note = 2'-O-methyluridine-3'-phosphate N-[tris(GalNAc-alkyl)-amidodecanoyl)]-4-hydroxyprolinol (Hyp-(GalNAc-alkyl)3)
aagcagatagatggtccagct

SEQ ID NO: 7217 - RNA, 21 nt, synthetic construct
  source 1..21: mol_type = other RNA
  modified_base 1: mod_base = OTHER; note = 2'-O-methylcytidine-3'-phosphorothioate
  modified_base 2: mod_base = OTHER; note = 2'-O-methyladenosine-3'-phosphorothioate
  modified_base 3: mod_base = OTHER; note = 2'-O-methylguanosine-3'-phosphate
  modified_base 4: mod_base = OTHER; note = 2'-O-methyladenosine-3'-phosphate
  modified_base 5: mod_base = OTHER; note = 2'-O-methyluridine-3'-phosphate
  modified_base 6: mod_base = OTHER; note = 2'-O-methyladenosine-3'-phosphate
  modified_base 7: mod_base = OTHER; note = 2'-fluoroguanosine-3'-phosphate
  modified_base 8: mod_base = OTHER; note = 2'-O-methyladenosine-3'-phosphate
  modified_base 9: mod_base = OTHER; note = 2'-fluorouridine-3'-phosphate
  modified_base 10: mod_base = OTHER; note = 2'-fluoroguanosine-3'-phosphate
  modified_base 11: mod_base = OTHER; note = 2'-fluoroguanosine-3'-phosphate
  modified_base 12: mod_base = OTHER; note = 2'-O-methyluridine-3'-phosphate
  modified_base 13: mod_base = OTHER; note = 2'-O-methylcytidine-3'-phosphate
  modified_base 14: mod_base = OTHER; note = 2'-O-methylcytidine-3'-phosphate
  modified_base 15: mod_base = OTHER; note = 2'-O-methyladenosine-3'-phosphate
  modified_base 16: mod_base = OTHER; note = 2'-O-methylguanosine-3'-phosphate
  modified_base 17: mod_base = OTHER; note = 2'-O-methylcytidine-3'-phosphate
  modified_base 18: mod_base = OTHER; note = 2'-O-methyladenosine-3'-phosphate
  modified_base 19: mod_base = OTHER; note = 2'-O-methylguanosine-3'-phosphate
  modified_base 20: mod_base = OTHER; note = 2'-O-methylguanosine-3'-phosphate
  modified_base 21: mod_base = OTHER; note = 2'-O-methyluridine-3'-phosphate N-[tris(GalNAc-alkyl)-amidodecanoyl)]-4-hydroxyprolinol (Hyp-(GalNAc-alkyl)3)
cagatagatggtccagcaggt

SEQ ID NO: 7218 - RNA, 21 nt, synthetic construct
  source 1..21: mol_type = other RNA
  modified_base 1: mod_base = OTHER; note = 2'-O-methyladenosine-3'-phosphorothioate
  modified_base 2: mod_base = OTHER; note = 2'-O-methyluridine-3'-phosphorothioate
  modified_base 3: mod_base = OTHER; note = 2'-O-methyladenosine-3'-phosphate
  modified_base 4: mod_base = OTHER; note = 2'-O-methylguanosine-3'-phosphate
  modified_base 5: mod_base = OTHER; note = 2'-O-methyladenosine-3'-phosphate
  modified_base 6: mod_base = OTHER; note = 2'-O-methyluridine-3'-phosphate
  modified_base 7: mod_base = OTHER; note = 2'-fluoroguanosine-3'-phosphate
  modified_base 8: mod_base = OTHER; note = 2'-O-methylguanosine-3'-phosphate
  modified_base 9: mod_base = OTHER; note = 2'-fluorouridine-3'-phosphate
  modified_base 10: mod_base = OTHER; note = 2'-fluorocytidine-3'-phosphate
  modified_base 11: mod_base = OTHER; note = 2'-fluorocytidine-3'-phosphate
  modified_base 12: mod_base = OTHER; note = 2'-O-methyladenosine-3'-phosphate
  modified_base 13: mod_base = OTHER; note = 2'-O-methylguanosine-3'-phosphate
  modified_base 14: mod_base = OTHER; note = 2'-O-methylcytidine-3'-phosphate
  modified_base 15: mod_base = OTHER; note = 2'-O-methyladenosine-3'-phosphate
  modified_base 16: mod_base = OTHER; note = 2'-O-methylguanosine-3'-phosphate
  modified_base 17: mod_base = OTHER; note = 2'-O-methylguanosine-3'-phosphate
  modified_base 18: mod_base = OTHER; note = 2'-O-methylcytidine-3'-phosphate
  modified_base 19: mod_base = OTHER; note = 2'-O-methyluridine-3'-phosphate
  modified_base 20: mod_base = OTHER; note = 2'-O-methyluridine-3'-phosphate
  modified_base 21: mod_base = OTHER; note = 2'-O-methyluridine-3'-phosphate N-[tris(GalNAc-alkyl)-amidodecanoyl)]-4-hydroxyprolinol (Hyp-(GalNAc-alkyl)3)
atagatggtccagcaggcttt

SEQ ID NO: 7219 - RNA, 21 nt, synthetic construct
  source 1..21: mol_type = other RNA
  modified_base 1: mod_base = OTHER; note = 2'-O-methyladenosine-3'-phosphorothioate
  modified_base 2: mod_base = OTHER; note = 2'-O-methyluridine-3'-phosphorothioate
  modified_base 3: mod_base = OTHER; note = 2'-O-methylguanosine-3'-phosphate
  modified_base 4: mod_base = OTHER; note = 2'-O-methylguanosine-3'-phosphate
  modified_base 5: mod_base = OTHER; note = 2'-O-methyluridine-3'-phosphate
  modified_base 6: mod_base = OTHER; note = 2'-O-methylcytidine-3'-phosphate
  modified_base 7: mod_base = OTHER; note = 2'-fluorocytidine-3'-phosphate
  modified_base 8: mod_base = OTHER; note = 2'-O-methyladenosine-3'-phosphate
  modified_base 9: mod_base = OTHER; note = 2'-fluoroguanosine-3'-phosphate
  modified_base 10: mod_base = OTHER; note = 2'-fluorocytidine-3'-phosphate
  modified_base 11: mod_base = OTHER; note = 2'-fluoroadenosine-3'-phosphate
  modified_base 12: mod_base = OTHER; note = 2'-O-methylguanosine-3'-phosphate
  modified_base 13: mod_base = OTHER; note = 2'-O-methylguanosine-3'-phosphate
  modified_base 14: mod_base = OTHER; note = 2'-O-methylcytidine-3'-phosphate
  modified_base 15: mod_base = OTHER; note = 2'-O-methyluridine-3'-phosphate
  modified_base 16: mod_base = OTHER; note = 2'-O-methyluridine-3'-phosphate
  modified_base 17: mod_base = OTHER; note = 2'-O-methylguanosine-3'-phosphate
  modified_base 18: mod_base = OTHER; note = 2'-O-methyladenosine-3'-phosphate
  modified_base 19: mod_base = OTHER; note = 2'-O-methyladenosine-3'-phosphate
  modified_base 20: mod_base = OTHER; note = 2'-O-methylguanosine-3'-phosphate
  modified_base 21: mod_base = OTHER; note = 2'-O-methyluridine-3'-phosphate N-[tris(GalNAc-alkyl)-amidodecanoyl)]-4-hydroxyprolinol (Hyp-(GalNAc-alkyl)3)
atggtccagcaggcttgaagt

SEQ ID NO: 7220 - RNA, 21 nt, synthetic construct
  source 1..21: mol_type = other RNA
  modified_base 1: mod_base = OTHER; note = 2'-O-methyluridine-3'-phosphorothioate
  modified_base 2: mod_base = OTHER; note = 2'-O-methylguanosine-3'-phosphorothioate
  modified_base 3: mod_base = OTHER; note = 2'-O-methylguanosine-3'-phosphate
  modified_base 4: mod_base = OTHER; note = 2'-O-methyluridine-3'-phosphate
  modified_base 5: mod_base = OTHER; note = 2'-O-methylcytidine-3'-phosphate
  modified_base 6: mod_base = OTHER; note = 2'-O-methylcytidine-3'-phosphate
  modified_base 7: mod_base = OTHER; note = 2'-fluoroadenosine-3'-phosphate
  modified_base 8: mod_base = OTHER; note = 2'-O-methylguanosine-3'-phosphate
  modified_base 9: mod_base = OTHER; note = 2'-fluorocytidine-3'-phosphate
  modified_base 10: mod_base = OTHER; note = 2'-fluoroadenosine-3'-phosphate
  modified_base 11: mod_base = OTHER; note = 2'-fluoroguanosine-3'-phosphate
  modified_base 12: mod_base = OTHER; note = 2'-O-methylguanosine-3'-phosphate
  modified_base 13: mod_base = OTHER; note = 2'-O-methylcytidine-3'-phosphate
  modified_base 14: mod_base = OTHER; note = 2'-O-methyluridine-3'-phosphate
  modified_base 15: mod_base = OTHER; note = 2'-O-methyluridine-3'-phosphate
  modified_base 16: mod_base = OTHER; note = 2'-O-methylguanosine-3'-phosphate
  modified_base 17: mod_base = OTHER; note = 2'-O-methyladenosine-3'-phosphate
  modified_base 18: mod_base = OTHER; note = 2'-O-methyladenosine-3'-phosphate
  modified_base 19: mod_base = OTHER; note = 2'-O-methylguanosine-3'-phosphate
  modified_base 20: mod_base = OTHER; note = 2'-O-methylcytidine-3'-phosphate
  modified_base 21: mod_base = OTHER; note = 2'-O-methyluridine-3'-phosphate N-[tris(GalNAc-alkyl)-amidodecanoyl)]-4-hydroxyprolinol (Hyp-(GalNAc-alkyl)3)
tggtccagcaggcttgaagct

SEQ ID NO: 7221 - RNA, 21 nt, synthetic construct
  source 1..21: mol_type = other RNA
  modified_base 1: mod_base = OTHER; note = 2'-O-methylguanosine-3'-phosphorothioate
  modified_base 2: mod_base = OTHER; note = 2'-O-methyluridine-3'-phosphorothioate
  modified_base 3: mod_base = OTHER; note = 2'-O-methylcytidine-3'-phosphate
  modified_base 4: mod_base = OTHER; note = 2'-O-methylcytidine-3'-phosphate
  modified_base 5: mod_base = OTHER; note = 2'-O-methyladenosine-3'-phosphate
  modified_base 6: mod_base = OTHER; note = 2'-O-methylguanosine-3'-phosphate
  modified_base 7: mod_base = OTHER; note = 2'-fluorocytidine-3'-phosphate
  modified_base 8: mod_base = OTHER; note = 2'-O-methyladenosine-3'-phosphate
  modified_base 9: mod_base = OTHER; note = 2'-fluoroguanosine-3'-phosphate
  modified_base 10: mod_base = OTHER; note = 2'-fluoroguanosine-3'-phosphate
  modified_base 11: mod_base = OTHER; note = 2'-fluorocytidine-3'-phosphate
  modified_base 12: mod_base = OTHER; note = 2'-O-methyluridine-3'-phosphate
  modified_base 13: mod_base = OTHER; note = 2'-O-methyluridine-3'-phosphate
  modified_base 14: mod_base = OTHER; note = 2'-O-methylguanosine-3'-phosphate
  modified_base 15: mod_base = OTHER; note = 2'-O-methyladenosine-3'-phosphate
  modified_base 16: mod_base = OTHER; note = 2'-O-methyladenosine-3'-phosphate
  modified_base 17: mod_base = OTHER; note = 2'-O-methylguanosine-3'-phosphate
  modified_base 18: mod_base = OTHER; note = 2'-O-methylcytidine-3'-phosphate
  modified_base 19: mod_base = OTHER; note = 2'-O-methyladenosine-3'-phosphate
  modified_base 20: mod_base = OTHER; note = 2'-O-methylguanosine-3'-phosphate
  modified_base 21: mod_base = OTHER; note = 2'-O-methyluridine-3'-phosphate N-[tris(GalNAc-alkyl)-amidodecanoyl)]-4-hydroxyprolinol (Hyp-(GalNAc-alkyl)3)
gtccagcaggcttgaagcagt

SEQ ID NO: 7222 - RNA, 21 nt, synthetic construct
  source 1..21: mol_type = other RNA
  modified_base 1: mod_base = OTHER; note = 2'-O-methylguanosine-3'-phosphorothioate
  modified_base 2: mod_base = OTHER; note = 2'-O-methylguanosine-3'-phosphorothioate
  modified_base 3: mod_base = OTHER; note = 2'-O-methyluridine-3'-phosphate
  modified_base 4: mod_base = OTHER; note = 2'-O-methylcytidine-3'-phosphate
  modified_base 5: mod_base = OTHER; note = 2'-O-methyladenosine-3'-phosphate
  modified_base 6: mod_base = OTHER; note = 2'-O-methyladenosine-3'-phosphate
  modified_base 7: mod_base = OTHER; note = 2'-fluoroguanosine-3'-phosphate
  modified_base 8: mod_base = OTHER; note = 2'-O-methyladenosine-3'-phosphate
  modified_base 9: mod_base = OTHER; note = 2'-fluoroguanosine-3'-phosphate
  modified_base 10: mod_base = OTHER; note = 2'-fluoroguanosine-3'-phosphate
  modified_base 11: mod_base = OTHER; note = 2'-fluoroguanosine-3'-phosphate
  modified_base 12: mod_base = OTHER; note = 2'-O-methyladenosine-3'-phosphate
  modified_base 13: mod_base = OTHER; note = 2'-O-methylguanosine-3'-phosphate
  modified_base 14: mod_base = OTHER; note = 2'-O-methyladenosine-3'-phosphate
  modified_base 15: mod_base = OTHER; note = 2'-O-methyluridine-3'-phosphate
  modified_base 16: mod_base = OTHER; note = 2'-O-methylguanosine-3'-phosphate
  modified_base 17: mod_base = OTHER; note = 2'-O-methylguanosine-3'-phosphate
  modified_base 18: mod_base = OTHER; note = 2'-O-methylguanosine-3'-phosphate
  modified_base 19: mod_base = OTHER; note = 2'-O-methylcytidine-3'-phosphate
  modified_base 20: mod_base = OTHER; note = 2'-O-methyladenosine-3'-phosphate
  modified_base 21: mod_base = OTHER; note = 2'-O-methyluridine-3'-phosphate N-[tris(GalNAc-alkyl)-amidodecanoyl)]-4-hydroxyprolinol (Hyp-(GalNAc-alkyl)3)
ggtcaagagggagatgggcat

SEQ ID NO: 7223 - RNA, 21 nt, synthetic construct
  source 1..21: mol_type = other RNA
  modified_base 1: mod_base = OTHER; note = 2'-O-methylguanosine-3'-phosphorothioate
  modified_base 2: mod_base = OTHER; note = 2'-O-methylcytidine-3'-phosphorothioate
  modified_base 3: mod_base = OTHER; note = 2'-O-methylguanosine-3'-phosphate
  modified_base 4: mod_base = OTHER; note = 2'-O-methylcytidine-3'-phosphate
  modified_base 5: mod_base = OTHER; note = 2'-O-methyluridine-3'-phosphate
  modified_base 6: mod_base = OTHER; note = 2'-O-methylguanosine-3'-phosphate
  modified_base 7: mod_base = OTHER; note = 2'-fluoroadenosine-3'-phosphate
  modified_base 8: mod_base = OTHER; note = 2'-O-methylguanosine-3'-phosphate
  modified_base 9: mod_base = OTHER; note = 2'-fluoroguanosine-3'-phosphate
  modified_base 10: mod_base = OTHER; note = 2'-fluoroguanosine-3'-phosphate
  modified_base 11: mod_base = OTHER; note = 2'-fluoroadenosine-3'-phosphate
  modified_base 12: mod_base = OTHER; note = 2'-O-methylguanosine-3'-phosphate
  modified_base 13: mod_base = OTHER; note = 2'-O-methylguanosine-3'-phosphate
  modified_base 14: mod_base = OTHER; note = 2'-O-methyladenosine-3'-phosphate
  modified_base 15: mod_base = OTHER; note = 2'-O-methyluridine-3'-phosphate
  modified_base 16: mod_base = OTHER; note = 2'-O-methylguanosine-3'-phosphate
  modified_base 17: mod_base = OTHER; note = 2'-O-methylcytidine-3'-phosphate
  modified_base 18: mod_base = OTHER; note = 2'-O-methyluridine-3'-phosphate
  modified_base 19: mod_base = OTHER; note = 2'-O-methyluridine-3'-phosphate
  modified_base 20: mod_base = OTHER; note = 2'-O-methyladenosine-3'-phosphate
  modified_base 21: mod_base = OTHER; note = 2'-O-methyluridine-3'-phosphate N-[tris(GalNAc-alkyl)-amidodecanoyl)]-4-hydroxyprolinol (Hyp-(GalNAc-alkyl)3)
gcgctgagggaggatgcttat

SEQ ID NO: 7224 - RNA, 21 nt, synthetic construct
  source 1..21: mol_type = other RNA
  modified_base 1: mod_base = OTHER; note = 2'-O-methylguanosine-3'-phosphorothioate
  modified_base 2: mod_base = OTHER; note = 2'-O-methylcytidine-3'-phosphorothioate
  modified_base 3: mod_base = OTHER; note = 2'-O-methyladenosine-3'-phosphate
  modified_base 4: mod_base = OTHER; note = 2'-O-methylcytidine-3'-phosphate
  modified_base 5: mod_base = OTHER; note = 2'-O-methyluridine-3'-phosphate
  modified_base 6: mod_base = OTHER; note = 2'-O-methyladenosine-3'-phosphate
  modified_base 7: mod_base = OTHER; note = 2'-fluoroadenosine-3'-phosphate
  modified_base 8: mod_base = OTHER; note = 2'-O-methylguanosine-3'-phosphate
  modified_base 9: mod_base = OTHER; note = 2'-fluorocytidine-3'-phosphate
  modified_base 10: mod_base = OTHER; note = 2'-fluorocytidine-3'-phosphate
  modified_base 11: mod_base = OTHER; note = 2'-fluorouridine-3'-phosphate
  modified_base 12: mod_base = OTHER; note = 2'-O-methyladenosine-3'-phosphate
  modified_base 13: mod_base = OTHER; note = 2'-O-methyladenosine-3'-phosphate
  modified_base 14: mod_base = OTHER; note = 2'-O-methylguanosine-3'-phosphate
  modified_base 15: mod_base = OTHER; note = 2'-O-methyladenosine-3'-phosphate
  modified_base 16: mod_base = OTHER; note = 2'-O-methyladenosine-3'-phosphate
  modified_base 17: mod_base = OTHER; note = 2'-O-methylguanosine-3'-phosphate
  modified_base 18: mod_base = OTHER; note = 2'-O-methyluridine-3'-phosphate
  modified_base 19: mod_base = OTHER; note = 2'-O-methyluridine-3'-phosphate
  modified_base 20: mod_base = OTHER; note = 2'-O-methylcytidine-3'-phosphate
  modified_base 21: mod_base = OTHER; note = 2'-O-methyluridine-3'-phosphate N-[tris(GalNAc-alkyl)-amidodecanoyl)]-4-hydroxyprolinol (Hyp-(GalNAc-alkyl)3)
gcactaagcctaagaagttct

SEQ ID NO: 7225 - RNA, 21 nt, synthetic construct
  source 1..21: mol_type = other RNA
  modified_base 1: mod_base = OTHER; note = 2'-O-methylcytidine-3'-phosphorothioate
  modified_base 2: mod_base = OTHER; note = 2'-O-methyladenosine-3'-phosphorothioate
  modified_base 3: mod_base = OTHER; note = 2'-O-methylcytidine-3'-phosphate
  modified_base 4: mod_base = OTHER; note = 2'-O-methyluridine-3'-phosphate
  modified_base 5: mod_base = OTHER; note = 2'-O-methyladenosine-3'-phosphate
  modified_base 6: mod_base = OTHER; note = 2'-O-methyladenosine-3'-phosphate
  modified_base 7: mod_base = OTHER; note = 2'-fluoroguanosine-3'-phosphate
  modified_base 8: mod_base = OTHER; note = 2'-O-methylcytidine-3'-phosphate
  modified_base 9: mod_base = OTHER; note = 2'-fluorocytidine-3'-phosphate
  modified_base 10: mod_base = OTHER; note = 2'-fluorouridine-3'-phosphate
  modified_base 11: mod_base = OTHER; note = 2'-fluoroadenosine-3'-phosphate
  modified_base 12: mod_base = OTHER; note = 2'-O-methyladenosine-3'-phosphate
  modified_base 13: mod_base = OTHER; note = 2'-O-methylguanosine-3'-phosphate
  modified_base 14: mod_base = OTHER; note = 2'-O-methyladenosine-3'-phosphate
  modified_base 15: mod_base = OTHER; note = 2'-O-methyladenosine-3'-phosphate
  modified_base 16: mod_base = OTHER; note = 2'-O-methylguanosine-3'-phosphate
  modified_base 17: mod_base = OTHER; note = 2'-O-methyluridine-3'-phosphate
  modified_base 18: mod_base = OTHER; note = 2'-O-methyluridine-3'-phosphate
  modified_base 19: mod_base = OTHER; note = 2'-O-methylcytidine-3'-phosphate
  modified_base 20: mod_base = OTHER; note = 2'-O-methylcytidine-3'-phosphate
  modified_base 21: mod_base = OTHER; note = 2'-O-methyluridine-3'-phosphate N-[tris(GalNAc-alkyl)-amidodecanoyl)]-4-hydroxyprolinol (Hyp-(GalNAc-alkyl)3)
cactaagcctaagaagttcct

SEQ ID NO: 7226 - RNA, 21 nt, synthetic construct
  source 1..21: mol_type = other RNA
  modified_base 1: mod_base = OTHER; note = 2'-O-methylcytidine-3'-phosphorothioate
  modified_base 2: mod_base = OTHER; note = 2'-O-methyladenosine-3'-phosphorothioate
  modified_base 3: mod_base = OTHER; note = 2'-O-methylguanosine-3'-phosphate
  modified_base 4: mod_base = OTHER; note = 2'-O-methylguanosine-3'-phosphate
  modified_base 5: mod_base = OTHER; note = 2'-O-methyladenosine-3'-phosphate
  modified_base 6: mod_base = OTHER; note = 2'-O-methylcytidine-3'-phosphate
  modified_base 7: mod_base = OTHER; note = 2'-fluorocytidine-3'-phosphate
  modified_base 8: mod_base = OTHER; note = 2'-O-methylcytidine-3'-phosphate
  modified_base 9: mod_base = OTHER; note = 2'-fluoroadenosine-3'-phosphate
  modified_base 10: mod_base = OTHER; note = 2'-fluorocytidine-3'-phosphate
  modified_base 11: mod_base = OTHER; note = 2'-fluorouridine-3'-phosphate
  modified_base 12: mod_base = OTHER; note = 2'-O-methylguanosine-3'-phosphate
  modified_base 13: mod_base = OTHER; note = 2'-O-methylguanosine-3'-phosphate
  modified_base 14: mod_base = OTHER; note = 2'-O-methylguanosine-3'-phosphate
  modified_base 15: mod_base = OTHER; note = 2'-O-methyladenosine-3'-phosphate
  modified_base 16: mod_base = OTHER; note = 2'-O-methylguanosine-3'-phosphate
  modified_base 17: mod_base = OTHER; note = 2'-O-methyladenosine-3'-phosphate
  modified_base 18: mod_base = OTHER; note = 2'-O-methylcytidine-3'-phosphate
  modified_base 19: mod_base = OTHER; note = 2'-O-methyladenosine-3'-phosphate
  modified_base 20: mod_base = OTHER; note = 2'-O-methyladenosine-3'-phosphate
  modified_base 21: mod_base = OTHER; note = 2'-O-methyluridine-3'-phosphate N-[tris(GalNAc-alkyl)-amidodecanoyl)]-4-hydroxyprolinol (Hyp-(GalNAc-alkyl)3)
caggacccactgggagacaat

SEQ ID NO: 7227 - RNA, 21 nt, synthetic construct
  source 1..21: mol_type = other RNA
  modified_base 1: mod_base = OTHER; note = 2'-O-methylguanosine-3'-phosphorothioate
  modified_base 2: mod_base = OTHER; note = 2'-O-methylguanosine-3'-phosphorothioate
  modified_base 3: mod_base = OTHER; note = 2'-O-methyladenosine-3'-phosphate
  modified_base 4: mod_base = OTHER; note = 2'-O-methylcytidine-3'-phosphate
  modified_base 5: mod_base = OTHER; note = 2'-O-methylcytidine-3'-phosphate
  modified_base 6: mod_base = OTHER; note = 2'-O-methylcytidine-3'-phosphate
  modified_base 7: mod_base = OTHER; note = 2'-fluoroadenosine-3'-phosphate
  modified_base 8: mod_base = OTHER; note = 2'-O-methylcytidine-3'-phosphate
  modified_base 9: mod_base = OTHER; note = 2'-fluorouridine-3'-phosphate
  modified_base 10: mod_base = OTHER; note = 2'-fluoroguanosine-3'-phosphate
  modified_base 11: mod_base = OTHER; note = 2'-fluoroguanosine-3'-phosphate
  modified_base 12: mod_base = OTHER; note = 2'-O-methylguanosine-3'-phosphate
  modified_base 13: mod_base = OTHER; note = 2'-O-methyladenosine-3'-phosphate
  modified_base 14: mod_base = OTHER; note = 2'-O-methylguanosine-3'-phosphate
  modified_base 15: mod_base = OTHER; note = 2'-O-methyladenosine-3'-phosphate
  modified_base 16: mod_base = OTHER; note = 2'-O-methylcytidine-3'-phosphate
  modified_base 17: mod_base = OTHER; note = 2'-O-methyladenosine-3'-phosphate
  modified_base 18: mod_base = OTHER; note = 2'-O-methyladenosine-3'-phosphate
  modified_base 19: mod_base = OTHER; note = 2'-O-methylguanosine-3'-phosphate
  modified_base 20: mod_base = OTHER; note = 2'-O-methylcytidine-3'-phosphate
  modified_base 21: mod_base = OTHER; note = 2'-O-methyluridine-3'-phosphate N-[tris(GalNAc-alkyl)-amidodecanoyl)]-4-hydroxyprolinol (Hyp-(GalNAc-alkyl)3)
ggacccactgggagacaagct

SEQ ID NO: 7228 - RNA, 21 nt, synthetic construct
  source 1..21: mol_type = other RNA
  modified_base 1: mod_base = OTHER; note = 2'-O-methyladenosine-3'-phosphorothioate
  modified_base 2: mod_base = OTHER; note = 2'-O-methylcytidine-3'-phosphorothioate
  modified_base 3: mod_base = OTHER; note = 2'-O-methylcytidine-3'-phosphate
  modified_base 4: mod_base = OTHER; note = 2'-O-methylcytidine-3'-phosphate
  modified_base 5: mod_base = OTHER; note = 2'-O-methyladenosine-3'-phosphate
  modified_base 6: mod_base = OTHER; note = 2'-O-methylcytidine-3'-phosphate
  modified_base 7: mod_base = OTHER; note = 2'-fluorouridine-3'-phosphate
  modified_base 8: mod_base = OTHER; note = 2'-O-methylguanosine-3'-phosphate
  modified_base 9: mod_base = OTHER; note = 2'-fluoroguanosine-3'-phosphate
  modified_base 10: mod_base = OTHER; note = 2'-fluoroguanosine-3'-phosphate
  modified_base 11: mod_base = OTHER; note = 2'-fluoroadenosine-3'-phosphate
  modified_base 12: mod_base = OTHER; note = 2'-O-methylguanosine-3'-phosphate
  modified_base 13: mod_base = OTHER; note = 2'-O-methyladenosine-3'-phosphate
  modified_base 14: mod_base = OTHER; note = 2'-O-methylcytidine-3'-phosphate
  modified_base 15: mod_base = OTHER; note = 2'-O-methyladenosine-3'-phosphate
  modified_base 16: mod_base = OTHER; note = 2'-O-methyladenosine-3'-phosphate
  modified_base 17: mod_base = OTHER; note = 2'-O-methylguanosine-3'-phosphate
  modified_base 18: mod_base = OTHER; note = 2'-O-methylcytidine-3'-phosphate
  modified_base 19: mod_base = OTHER; note = 2'-O-methyladenosine-3'-phosphate
  modified_base 20: mod_base = OTHER; note = 2'-O-methyluridine-3'-phosphate
  modified_base 21: mod_base = OTHER; note = 2'-O-methyluridine-3'-phosphate N-[tris(GalNAc-alkyl)-amidodecanoyl)]-4-hydroxyprolinol (Hyp-(GalNAc-alkyl)3)
acccactgggagacaagcatt

SEQ ID NO: 7229 - RNA, 21 nt, synthetic construct
  source 1..21: mol_type = other RNA
  modified_base 1: mod_base = OTHER; note = 2'-O-methylcytidine-3'-phosphorothioate
  modified_base 2: mod_base = OTHER; note = 2'-O-methylcytidine-3'-phosphorothioate
  modified_base 3: mod_base = OTHER; note = 2'-O-methylcytidine-3'-phosphate
  modified_base 4: mod_base = OTHER; note = 2'-O-methyladenosine-3'-phosphate
  modified_base 5: mod_base = OTHER; note = 2'-O-methylcytidine-3'-phosphate
  modified_base 6: mod_base = OTHER; note = 2'-O-methyluridine-3'-phosphate
  modified_base 7: mod_base = OTHER; note = 2'-fluoroguanosine-3'-phosphate
  modified_base 8: mod_base = OTHER; note = 2'-O-methylguanosine-3'-phosphate
  modified_base 9: mod_base = OTHER; note = 2'-fluoroguanosine-3'-phosphate
  modified_base 10: mod_base = OTHER; note = 2'-fluoroadenosine-3'-phosphate
  modified_base 11: mod_base = OTHER; note = 2'-fluoroguanosine-3'-phosphate
  modified_base 12: mod_base = OTHER; note = 2'-O-methyladenosine-3'-phosphate
  modified_base 13: mod_base = OTHER; note = 2'-O-methylcytidine-3'-phosphate
  modified_base 14: mod_base = OTHER; note = 2'-O-methyladenosine-3'-phosphate
  modified_base 15: mod_base = OTHER; note = 2'-O-methyladenosine-3'-phosphate
  modified_base 16: mod_base = OTHER; note = 2'-O-methylguanosine-3'-phosphate
  modified_base 17: mod_base = OTHER; note = 2'-O-methylcytidine-3'-phosphate
  modified_base 18: mod_base = OTHER; note = 2'-O-methyladenosine-3'-phosphate
  modified_base 19: mod_base = OTHER; note = 2'-O-methyluridine-3'-phosphate
  modified_base 20: mod_base = OTHER; note = 2'-O-methyluridine-3'-phosphate
  modified_base 21: mod_base = OTHER; note = 2'-O-methyluridine-3'-phosphate N-[tris(GalNAc-alkyl)-amidodecanoyl)]-4-hydroxyprolinol (Hyp-(GalNAc-alkyl)3)
cccactgggagacaagcattt

SEQ ID NO: 7230 - RNA, 21 nt, synthetic construct
  source 1..21: mol_type = other RNA
  modified_base 1: mod_base = OTHER; note = 2'-O-methylguanosine-3'-phosphorothioate
  modified_base 2: mod_base = OTHER; note = 2'-O-methyladenosine-3'-phosphorothioate
  modified_base 3: mod_base = OTHER; note = 2'-O-methylguanosine-3'-phosphate
  modified_base 4: mod_base = OTHER; note = 2'-O-methyladenosine-3'-phosphate
  modified_base 5: mod_base = OTHER; note = 2'-O-methylcytidine-3'-phosphate
  modified_base 6: mod_base = OTHER; note = 2'-O-methyladenosine-3'-phosphate
  modified_base 7: mod_base = OTHER; note = 2'-fluoroadenosine-3'-phosphate
  modified_base 8: mod_base = OTHER; note = 2'-O-methylguanosine-3'-phosphate
  modified_base 9: mod_base = OTHER; note = 2'-fluorocytidine-3'-phosphate
  modified_base 10: mod_base = OTHER; note = 2'-fluoroadenosine-3'-phosphate
  modified_base 11: mod_base = OTHER; note = 2'-fluorouridine-3'-phosphate
  modified_base 12: mod_base = OTHER; note = 2'-O-methyluridine-3'-phosphate
  modified_base 13: mod_base = OTHER; note = 2'-O-methyluridine-3'-phosphate
  modified_base 14: mod_base = OTHER; note = 2'-O-methyladenosine-3'-phosphate
  modified_base 15: mod_base = OTHER; note = 2'-O-methyluridine-3'-phosphate
  modified_base 16: mod_base = OTHER; note = 2'-O-methyladenosine-3'-phosphate
  modified_base 17: mod_base = OTHER; note = 2'-O-methylcytidine-3'-phosphate
  modified_base 18: mod_base = OTHER; note = 2'-O-methyluridine-3'-phosphate
  modified_base 19: mod_base = OTHER; note = 2'-O-methyluridine-3'-phosphate
  modified_base 20: mod_base = OTHER; note = 2'-O-methyluridine-3'-phosphate
  modified_base 21: mod_base = OTHER; note = 2'-O-methyluridine-3'-phosphate N-[tris(GalNAc-alkyl)-amidodecanoyl)]-4-hydroxyprolinol (Hyp-(GalNAc-alkyl)3)
gagacaagcatttatactttt

SEQ ID NO: 7231 - RNA, 21 nt, synthetic construct
  source 1..21: mol_type = other RNA
  modified_base 1: mod_base = OTHER; note = 2'-O-methyladenosine-3'-phosphorothioate
  modified_base 2: mod_base = OTHER; note = 2'-O-methylguanosine-3'-phosphorothioate
  modified_base 3: mod_base = OTHER; note = 2'-O-methyladenosine-3'-phosphate
  modified_base 4: mod_base = OTHER; note = 2'-O-methylcytidine-3'-phosphate
  modified_base 5: mod_base = OTHER; note = 2'-O-methyladenosine-3'-phosphate
  modified_base 6: mod_base = OTHER; note = 2'-O-methyladenosine-3'-phosphate
  modified_base 7: mod_base = OTHER; note = 2'-fluoroguanosine-3'-phosphate
  modified_base 8: mod_base = OTHER; note = 2'-O-methylcytidine-3'-phosphate
  modified_base 9: mod_base = OTHER; note = 2'-fluoroadenosine-3'-phosphate
  modified_base 10: mod_base = OTHER; note = 2'-fluorouridine-3'-phosphate
  modified_base 11: mod_base = OTHER; note = 2'-fluorouridine-3'-phosphate
  modified_base 12: mod_base = OTHER; note = 2'-O-methyluridine-3'-phosphate
  modified_base 13: mod_base = OTHER; note = 2'-O-methyladenosine-3'-phosphate
  modified_base 14: mod_base = OTHER; note = 2'-O-methyluridine-3'-phosphate
  modified_base 15: mod_base = OTHER; note = 2'-O-methyladenosine-3'-phosphate
  modified_base 16: mod_base = OTHER; note = 2'-O-methylcytidine-3'-phosphate
  modified_base 17: mod_base = OTHER; note = 2'-O-methyluridine-3'-phosphate
  modified_base 18: mod_base = OTHER; note = 2'-O-methyluridine-3'-phosphate
  modified_base 19: mod_base = OTHER; note = 2'-O-methyluridine-3'-phosphate
  modified_base 20: mod_base = OTHER; note = 2'-O-methylcytidine-3'-phosphate
  modified_base 21: mod_base = OTHER; note = 2'-O-methyluridine-3'-phosphate N-[tris(GalNAc-alkyl)-amidodecanoyl)]-4-hydroxyprolinol (Hyp-(GalNAc-alkyl)3)
agacaagcatttatactttct

SEQ ID NO: 7232 - RNA, 21 nt, synthetic construct
  source 1..21: mol_type = other RNA
  modified_base 1: mod_base = OTHER; note = 2'-O-methyladenosine-3'-phosphorothioate
  modified_base 2: mod_base = OTHER; note = 2'-O-methylguanosine-3'-phosphorothioate
  modified_base 3: mod_base = OTHER; note = 2'-O-methylguanosine-3'-phosphate
  modified_base 4: mod_base = OTHER; note = 2'-O-methyluridine-3'-phosphate
  modified_base 5: mod_base = OTHER; note = 2'-O-methylcytidine-3'-phosphate
  modified_base 6: mod_base = OTHER; note = 2'-O-methyladenosine-3'-phosphate
  modified_base 7: mod_base = OTHER; note = 2'-fluoroadenosine-3'-phosphate
  modified_base 8: mod_base = OTHER; note = 2'-O-methylguanosine-3'-phosphate
  modified_base 9: mod_base = OTHER; note = 2'-fluoroadenosine-3'-phosphate
  modified_base 10: mod_base = OTHER; note = 2'-fluoroguanosine-3'-phosphate
  modified_base 11: mod_base = OTHER; note = 2'-fluoroguanosine-3'-phosphate
  modified_base 12: mod_base = OTHER; note = 2'-O-methylguanosine-3'-phosphate
  modified_base 13: mod_base = OTHER; note = 2'-O-methyladenosine-3'-phosphate
  modified_base 14: mod_base = OTHER; note = 2'-O-methylguanosine-3'-phosphate
  modified_base 15: mod_base = OTHER; note = 2'-O-methyladenosine-3'-phosphate
  modified_base 16: mod_base = OTHER; note = 2'-O-methyluridine-3'-phosphate
  modified_base 17: mod_base = OTHER; note = 2'-O-methylguanosine-3'-phosphate
  modified_base 18: mod_base = OTHER; note = 2'-O-methylguanosine-3'-phosphate
  modified_base 19: mod_base = OTHER; note = 2'-O-methylguanosine-3'-phosphate
  modified_base 20: mod_base = OTHER; note = 2'-O-methylcytidine-3'-phosphate
  modified_base 21: mod_base = OTHER; note = 2'-O-methyluridine-3'-phosphate N-[tris(GalNAc-alkyl)-amidodecanoyl)]-4-hydroxyprolinol (Hyp-(GalNAc-alkyl)3)
aggtcaagagggagatgggct

SEQ ID NO: 7233 - DNA, 23 bp, synthetic construct
  source 1..23: mol_type = other DNA
  modified_base 1: mod_base = OTHER; note = 2'-O-methyladenosine-3'-phosphorothioate
  modified_base 2: mod_base = OTHER; note = 2'-deoxycytidine-3'-phosphorothioate
  modified_base 3: mod_base = OTHER; note = 2'-O-methylcytidine-3'-phosphate
  modified_base 4: mod_base = OTHER; note = 2'-O-methyluridine-3'-phosphate
  modified_base 6: mod_base = OTHER; note = 2'-O-methyladenosine-3'-phosphate
  modified_base 8: mod_base = OTHER; note = 2'-O-methyladenosine-3'-phosphate
  modified_base 9: mod_base = OTHER; note = 2'-O-methylguanosine-3'-phosphate
  modified_base 10: mod_base = OTHER; note = 2'-O-methylcytidine-3'-phosphate
  modified_base 11: mod_base = OTHER; note = 2'-O-methyluridine-3'-phosphate
  modified_base 13: mod_base = OTHER; note = 2'-O-methyladenosine-3'-phosphate
  modified_base 14: mod_base = OTHER; note = 2'-fluorouridine-3'-phosphate
  modified_base 15: mod_base = OTHER; note = 2'-O-methylguanosine-3'-phosphate
  modified_base 16: mod_base = OTHER; note = 2'-O-methyluridine-3'-phosphate
  modified_base 17: mod_base = OTHER; note = 2'-O-methylcytidine-3'-phosphate
  modified_base 18: mod_base = OTHER; note = 2'-O-methyluridine-3'-phosphate
  modified_base 19: mod_base = OTHER; note = 2'-O-methylguanosine-3'-phosphate
  modified_base 20: mod_base = OTHER; note = 2'-O-methylguanosine-3'-phosphate
  modified_base 21: mod_base = OTHER; note = 2'-O-methylcytidine-3'-phosphorothioate
  modified_base 22: mod_base = OTHER; note = 2'-O-methyluridine-3'-phosphorothioate
  modified_base 23: mod_base = OTHER; note = 2'-O-methyladenosine-3'-phosphate
  misc_feature 1: note = RNA
  misc_feature 2: note = DNA
  misc_feature 3..4: note = RNA
  misc_feature 5: note = DNA
  misc_feature 6: note = RNA
  misc_feature 7: note = DNA
  misc_feature 8..11: note = RNA
  misc_feature 12: note = DNA
  misc_feature 13..23: note = RNA
acctcacagctcatgtctggcta

SEQ ID NO: 7234 - DNA, 23 bp, synthetic construct
  source 1..23: mol_type = other DNA
  modified_base 1: mod_base = OTHER; note = 2'-O-methyladenosine-3'-phosphorothioate
  modified_base 2: mod_base = OTHER; note = 2'-deoxycytidine-3'-phosphorothioate
  modified_base 3: mod_base = OTHER; note = 2'-O-methylcytidine-3'-phosphate
  modified_base 4: mod_base = OTHER; note = 2'-O-methylcytidine-3'-phosphate
  modified_base 6: mod_base = OTHER; note = 2'-O-methylcytidine-3'-phosphate
  modified_base 8: mod_base = OTHER; note = 2'-O-methylcytidine-3'-phosphate
  modified_base 9: mod_base = OTHER; note = 2'-O-methyladenosine-3'-phosphate
  modified_base 10: mod_base = OTHER; note = 2'-O-methylguanosine-3'-phosphate
  modified_base 11: mod_base = OTHER; note = 2'-O-methylcytidine-3'-phosphate
  modified_base 13: mod_base = OTHER; note = 2'-O-methylcytidine-3'-phosphate
  modified_base 14: mod_base = OTHER; note = 2'-fluoroadenosine-3'-phosphate
  modified_base 15: mod_base = OTHER; note = 2'-O-methyluridine-3'-phosphate
  modified_base 16: mod_base = OTHER; note = 2'-O-methylguanosine-3'-phosphate
  modified_base 17: mod_base = OTHER; note = 2'-O-methyluridine-3'-phosphate
  modified_base 18: mod_base = OTHER; note = 2'-O-methylcytidine-3'-phosphate
  modified_base 19: mod_base = OTHER; note = 2'-O-methyluridine-3'-phosphate
  modified_base 20: mod_base = OTHER; note = 2'-O-methylguanosine-3'-phosphate
  modified_base 21: mod_base = OTHER; note = 2'-O-methylguanosine-3'-phosphorothioate
  modified_base 22: mod_base = OTHER; note = 2'-O-methylcytidine-3'-phosphorothioate
  modified_base 23: mod_base = OTHER; note = 2'-O-methyluridine-3'-phosphate
  misc_feature 1: note = RNA
  misc_feature 2: note = DNA
  misc_feature 3..4: note = RNA
  misc_feature 5: note = DNA
  misc_feature 6: note = RNA
  misc_feature 7: note = DNA
  misc_feature 8..11: note = RNA
  misc_feature 12: note = DNA
  misc_feature 13..23: note = RNA
accctcacagctcatgtctggct

SEQ ID NO: 7235 - DNA, 23 bp, synthetic construct
  source 1..23: mol_type = other DNA
  modified_base 1: mod_base = OTHER; note = 2'-O-methyladenosine-3'-phosphorothioate
  modified_base 2: mod_base = OTHER; note = 2'-deoxyguanosine-3'-phosphorothioate
  modified_base 3: mod_base = OTHER; note = 2'-O-methyladenosine-3'-phosphate
  modified_base 4: mod_base = OTHER; note = 2'-O-methylcytidine-3'-phosphate
  modified_base 6: mod_base = OTHER; note = 2'-O-methylcytidine-3'-phosphate
  modified_base 8: mod_base = OTHER; note = 2'-O-methylcytidine-3'-phosphate
  modified_base 9: mod_base = OTHER; note = 2'-O-methyladenosine-3'-phosphate
  modified_base 10: mod_base = OTHER; note = 2'-O-methylcytidine-3'-phosphate
  modified_base 11: mod_base = OTHER; note = 2'-O-methyladenosine-3'-phosphate
  modified_base 13: mod_base = OTHER; note = 2'-O-methylcytidine-3'-phosphate
  modified_base 14: mod_base = OTHER; note = 2'-fluorouridine-3'-phosphate
  modified_base 15: mod_base = OTHER; note = 2'-O-methylcytidine-3'-phosphate
  modified_base 16: mod_base = OTHER; note = 2'-O-methyladenosine-3'-phosphate
  modified_base 17: mod_base = OTHER; note = 2'-O-methyluridine-3'-phosphate
  modified_base 18: mod_base = OTHER; note = 2'-O-methylguanosine-3'-phosphate
  modified_base 19: mod_base = OTHER; note = 2'-O-methyluridine-3'-phosphate
  modified_base 20: mod_base = OTHER; note = 2'-O-methylcytidine-3'-phosphate
  modified_base 21: mod_base = OTHER; note = 2'-O-methyluridine-3'-phosphorothioate
  modified_base 22: mod_base = OTHER; note = 2'-O-methylguanosine-3'-phosphorothioate
  modified_base 23: mod_base = OTHER; note = 2'-O-methylguanosine-3'-phosphate
  misc_feature 1: note = RNA
  misc_feature 2: note = DNA
  misc_feature 3..4: note = RNA
  misc_feature 5: note = DNA
  misc_feature 6: note = RNA
  misc_feature 7: note = DNA
  misc_feature 8..11: note = RNA
  misc_feature 12: note = DNA
  misc_feature 13..23: note = RNA
agaccctcacagctcatgtctgg

SEQ ID NO: 7236 - DNA, 23 bp, synthetic construct
  source 1..23: mol_type = other DNA
  modified_base 1: mod_base = OTHER; note = 2'-O-methyladenosine-3'-phosphorothioate
  modified_base 2: mod_base = OTHER; note = 2'-deoxythimidine-3'-phosphorothioate
  modified_base 3: mod_base = OTHER; note = 2'-O-methylguanosine-3'-phosphate
  modified_base 4: mod_base = OTHER; note = 2'-O-methyladenosine-3'-phosphate
  modified_base 6: mod_base = OTHER; note = 2'-O-methylcytidine-3'-phosphate
  modified_base 8: mod_base = OTHER; note = 2'-O-methyluridine-3'-phosphate
  modified_base 9: mod_base = OTHER; note = 2'-O-methylcytidine-3'-phosphate
  modified_base 10: mod_base = OTHER; note = 2'-O-methyladenosine-3'-phosphate
  modified_base 11: mod_base = OTHER; note = 2'-O-methylcytidine-3'-phosphate
  modified_base 13: mod_base = OTHER; note = 2'-O-methylguanosine-3'-phosphate
  modified_base 14: mod_base = OTHER; note = 2'-fluorocytidine-3'-phosphate
  modified_base 15: mod_base = OTHER; note = 2'-O-methyluridine-3'-phosphate
  modified_base 16: mod_base = OTHER; note = 2'-O-methylcytidine-3'-phosphate
  modified_base 17: mod_base = OTHER; note = 2'-O-methyladenosine-3'-phosphate
  modified_base 18: mod_base = OTHER; note = 2'-O-methyluridine-3'-phosphate
  modified_base 19: mod_base = OTHER; note = 2'-O-methylguanosine-3'-phosphate
  modified_base 20: mod_base = OTHER; note = 2'-O-methyluridine-3'-phosphate
  modified_base 21: mod_base = OTHER; note = 2'-O-methylcytidine-3'-phosphorothioate
  modified_base 22: mod_base = OTHER; note = 2'-O-methyluridine-3'-phosphorothioate
  modified_base 23: mod_base = OTHER; note = 2'-O-methylguanosine-3'-phosphate
  misc_feature 1: note = RNA
  misc_feature 2: note = DNA
  misc_feature 3..4: note = RNA
  misc_feature 5: note = DNA
  misc_feature 6: note = RNA
  misc_feature 7: note = DNA
  misc_feature 8..11: note = RNA
  misc_feature 12: note = DNA
  misc_feature 13..23: note = RNA
atgaccctcacagctcatgtctg

SEQ ID NO: 7237 - DNA, 23 bp, synthetic construct
  source 1..23: mol_type = other DNA
  modified_base 1: mod_base = OTHER; note = 2'-O-methyladenosine-3'-phosphorothioate
  modified_base 2: mod_base = OTHER; note = 2'-deoxythimidine-3'-phosphorothioate
  modified_base 3: mod_base = OTHER; note = 2'-O-methyluridine-3'-phosphate
  modified_base 4: mod_base = OTHER; note = 2'-O-methylguanosine-3'-phosphate
  modified_base 6: mod_base = OTHER; note = 2'-O-methylcytidine-3'-phosphate
  modified_base 8: mod_base = OTHER; note = 2'-O-methylcytidine-3'-phosphate
  modified_base 9: mod_base = OTHER; note = 2'-O-methyluridine-3'-phosphate
  modified_base 10: mod_base = OTHER; note = 2'-O-methylcytidine-3'-phosphate
  modified_base 11: mod_base = OTHER; note = 2'-O-methyladenosine-3'-phosphate
  modified_base 13: mod_base = OTHER; note = 2'-O-methyladenosine-3'-phosphate
  modified_base 14: mod_base = OTHER; note = 2'-fluoroguanosine-3'-phosphate
  modified_base 15: mod_base = OTHER; note = 2'-O-methylcytidine-3'-phosphate
  modified_base 16: mod_base = OTHER; note = 2'-O-methyluridine-3'-phosphate
  modified_base 17: mod_base = OTHER; note = 2'-O-methylcytidine-3'-phosphate
  modified_base 18: mod_base = OTHER; note = 2'-O-methyladenosine-3'-phosphate
  modified_base 19: mod_base = OTHER; note = 2'-O-methyluridine-3'-phosphate
  modified_base 20: mod_base = OTHER; note = 2'-O-methylguanosine-3'-phosphate
  modified_base 21: mod_base = OTHER; note = 2'-O-methyluridine-3'-phosphorothioate
  modified_base 22: mod_base = OTHER; note = 2'-O-methylcytidine-3'-phosphorothioate
  modified_base 23: mod_base = OTHER; note = 2'-O-methyluridine-3'-phosphate
  misc_feature 1: note = RNA
  misc_feature 2: note = DNA
  misc_feature 3..4: note = RNA
  misc_feature 5: note = DNA
  misc_feature 6: note = RNA
  misc_feature 7: note = DNA
  misc_feature 8..11: note = RNA
  misc_feature 12: note = DNA
  misc_feature 13..23: note = RNA
attgaccctcacagctcatgtct

SEQ ID NO: 7238 - DNA, 23 bp, synthetic construct
  source 1..23: mol_type = other DNA
  modified_base 1: mod_base = OTHER; note = 2'-O-methyladenosine-3'-phosphorothioate
  modified_base 2: mod_base = OTHER; note = 2'-deoxycytidine-3'-phosphorothioate
  modified_base 3: mod_base = OTHER; note = 2'-O-methyluridine-3'-phosphate
  modified_base 4: mod_base = OTHER; note = 2'-O-methyluridine-3'-phosphate
  modified_base 6: mod_base = OTHER; note = 2'-O-methyladenosine-3'-phosphate
  modified_base 8: mod_base = OTHER; note = 2'-O-methylcytidine-3'-phosphate
  modified_base 9: mod_base = OTHER; note = 2'-O-methylcytidine-3'-phosphate
  modified_base 10: mod_base = OTHER; note = 2'-O-methyluridine-3'-phosphate
  modified_base 11: mod_base = OTHER; note = 2'-O-methylcytidine-3'-phosphate
  modified_base 13: mod_base = OTHER; note = 2'-O-methylcytidine-3'-phosphate
  modified_base 14: mod_base = OTHER; note = 2'-fluoroadenosine-3'-phosphate
  modified_base 15: mod_base = OTHER; note = 2'-O-methylguanosine-3'-phosphate
  modified_base 16: mod_base = OTHER; note = 2'-O-methylcytidine-3'-phosphate
  modified_base 17: mod_base = OTHER; note = 2'-O-methyluridine-3'-phosphate
  modified_base 18: mod_base = OTHER; note = 2'-O-methylcytidine-3'-phosphate
  modified_base 19: mod_base = OTHER; note = 2'-O-methyladenosine-3'-phosphate
  modified_base 20: mod_base = OTHER; note = 2'-O-methyluridine-3'-phosphate
  modified_base 21: mod_base = OTHER; note = 2'-O-methylguanosine-3'-phosphorothioate
  modified_base 22: mod_base = OTHER; note = 2'-O-methyluridine-3'-phosphorothioate
  modified_base 23: mod_base = OTHER; note = 2'-O-methylcytidine-3'-phosphate
  misc_feature 1: note = RNA
  misc_feature 2: note = DNA
  misc_feature 3..4: note = RNA
  misc_feature 5: note = DNA
  misc_feature 6: note = RNA
  misc_feature 7: note = DNA
  misc_feature 8..11: note = RNA
  misc_feature 12: note = DNA
  misc_feature 13..23: note = RNA
acttgaccctcacagctcatgtc

SEQ ID NO: 7239 - DNA, 23 bp, synthetic construct
  source 1..23: mol_type = other DNA
  modified_base 1: mod_base = OTHER; note = 2'-O-methyladenosine-3'-phosphorothioate
  modified_base 2: mod_base = OTHER; note = 2'-deoxyguanosine-3'-phosphorothioate
  modified_base 3: mod_base = OTHER; note = 2'-O-methylcytidine-3'-phosphate
  modified_base 4: mod_base = OTHER; note = 2'-O-methyluridine-3'-phosphate
  modified_base 6: mod_base = OTHER; note = 2'-O-methylguanosine-3'-phosphate
  modified_base 8: mod_base = OTHER; note = 2'-O-methylcytidine-3'-phosphate
  modified_base 9: mod_base = OTHER; note = 2'-O-methylcytidine-3'-phosphate
  modified_base 10: mod_base = OTHER; note = 2'-O-methylcytidine-3'-phosphate
  modified_base 11: mod_base = OTHER; note = 2'-O-methyluridine-3'-phosphate
  modified_base 13: mod_base = OTHER; note = 2'-O-methyladenosine-3'-phosphate
  modified_base 14: mod_base = OTHER; note = 2'-fluorocytidine-3'-phosphate
  modified_base 15: mod_base = OTHER; note = 2'-O-methyladenosine-3'-phosphate
  modified_base 16: mod_base = OTHER; note = 2'-O-methylguanosine-3'-phosphate
  modified_base 17: mod_base = OTHER; note = 2'-O-methylcytidine-3'-phosphate
  modified_base 18: mod_base = OTHER; note = 2'-O-methyluridine-3'-phosphate
  modified_base 19: mod_base = OTHER; note = 2'-O-methylcytidine-3'-phosphate
  modified_base 20: mod_base = OTHER; note = 2'-O-methyladenosine-3'-phosphate
  modified_base 21: mod_base = OTHER; note = 2'-O-methyluridine-3'-phosphorothioate
  modified_base 22: mod_base = OTHER; note = 2'-O-methylguanosine-3'-phosphorothioate
  modified_base 23: mod_base = OTHER; note = 2'-O-methyluridine-3'-phosphate
  misc_feature 1: note = RNA
  misc_feature 2: note = DNA
  misc_feature 3..4: note = RNA
  misc_feature 5: note = DNA
  misc_feature 6: note = RNA
  misc_feature 7: note = DNA
  misc_feature 8..11: note = RNA
  misc_feature 12: note = DNA
  misc_feature 13..23: note = RNA
agcttgaccctcacagctcatgt

SEQ ID NO: 7240 - DNA, 23 bp, synthetic construct
  source 1..23: mol_type = other DNA
  modified_base 1: mod_base = OTHER; note = 2'-O-methyladenosine-3'-phosphorothioate
  modified_base 2: mod_base = OTHER; note = 2'-deoxythimidine-3'-phosphorothioate
  modified_base 3: mod_base = OTHER; note = 2'-O-methylguanosine-3'-phosphate
  modified_base 4: mod_base = OTHER; note = 2'-O-methylcytidine-3'-phosphate
  modified_base 6: mod_base = OTHER; note = 2'-O-methyluridine-3'-phosphate
  modified_base 8: mod_base = OTHER; note = 2'-O-methyladenosine-3'-phosphate
  modified_base 9: mod_base = OTHER; note = 2'-O-methylcytidine-3'-phosphate
  modified_base 10: mod_base = OTHER; note = 2'-O-methylcytidine-3'-phosphate
  modified_base 11: mod_base = OTHER; note = 2'-O-methylcytidine-3'-phosphate
  modified_base 13: mod_base = OTHER; note = 2'-O-methylcytidine-3'-phosphate
  modified_base 14: mod_base = OTHER; note = 2'-fluoroadenosine-3'-phosphate
  modified_base 15: mod_base = OTHER; note = 2'-O-methylcytidine-3'-phosphate
  modified_base 16: mod_base = OTHER; note = 2'-O-methyladenosine-3'-phosphate
  modified_base 17: mod_base = OTHER; note = 2'-O-methylguanosine-3'-phosphate
  modified_base 18: mod_base = OTHER; note = 2'-O-methylcytidine-3'-phosphate
  modified_base 19: mod_base = OTHER; note = 2'-O-methyluridine-3'-phosphate
  modified_base 20: mod_base = OTHER; note = 2'-O-methylcytidine-3'-phosphate
  modified_base 21: mod_base = OTHER; note = 2'-O-methyladenosine-3'-phosphorothioate
  modified_base 22: mod_base = OTHER; note = 2'-O-methyluridine-3'-phosphorothioate
  modified_base 23: mod_base = OTHER; note = 2'-O-methylguanosine-3'-phosphate
  misc_feature 1: note = RNA
  misc_feature 2: note = DNA
  misc_feature 3..4: note = RNA
  misc_feature 5: note = DNA
  misc_feature 6: note = RNA
  misc_feature 7: note = DNA
  misc_feature 8..11: note = RNA
  misc_feature 12: note = DNA
  misc_feature 13..23: note = RNA
atgcttgaccctcacagctcatg

SEQ ID NO: 7241 - DNA, 23 bp, synthetic construct
  source 1..23: mol_type = other DNA
  modified_base 1: mod_base = OTHER; note = 2'-O-methyladenosine-3'-phosphorothioate
  modified_base 2: mod_base = OTHER; note = 2'-deoxyguanosine-3'-phosphorothioate
  modified_base 3: mod_base = OTHER; note = 2'-O-methyluridine-3'-phosphate
  modified_base 4: mod_base = OTHER; note = 2'-O-methylguanosine-3'-phosphate
  modified_base 6: mod_base = OTHER; note = 2'-O-methyluridine-3'-phosphate
  modified_base 8: mod_base = OTHER; note = 2'-O-methylguanosine-3'-phosphate
  modified_base 9: mod_base = OTHER; note = 2'-O-methyladenosine-3'-phosphate
  modified_base 10: mod_base = OTHER; note = 2'-O-methylcytidine-3'-phosphate
  modified_base 11: mod_base = OTHER; note = 2'-O-methylcytidine-3'-phosphate
  modified_base 13: mod_base = OTHER; note = 2'-O-methyluridine-3'-phosphate
  modified_base 14: mod_base = OTHER; note = 2'-fluorocytidine-3'-phosphate
  modified_base 15: mod_base = OTHER; note = 2'-O-methyladenosine-3'-phosphate
  modified_base 16: mod_base = OTHER; note = 2'-O-methylcytidine-3'-phosphate
  modified_base 17: mod_base = OTHER; note = 2'-O-methyladenosine-3'-phosphate
  modified_base 18: mod_base = OTHER; note = 2'-O-methylguanosine-3'-phosphate
  modified_base 19: mod_base = OTHER; note = 2'-O-methylcytidine-3'-phosphate
  modified_base 20: mod_base = OTHER; note = 2'-O-methyluridine-3'-phosphate
  modified_base 21: mod_base = OTHER; note = 2'-O-methylcytidine-3'-phosphorothioate
  modified_base 22: mod_base = OTHER; note = 2'-O-methyladenosine-3'-phosphorothioate
  modified_base 23: mod_base = OTHER; note = 2'-O-methyluridine-3'-phosphate
  misc_feature 1: note = RNA
  misc_feature 2: note = DNA
  misc_feature 3..4: note = RNA
  misc_feature 5: note = DNA
  misc_feature 6: note = RNA
  misc_feature 7: note = DNA
  misc_feature 8..11: note = RNA
  misc_feature 12: note = DNA
  misc_feature 13..23: note = RNA
agtgcttgaccctcacagctcat

SEQ ID NO: 7242 - DNA, 23 bp, synthetic construct
  source 1..23: mol_type = other DNA
  modified_base 1: mod_base = OTHER; note = 2'-O-methyladenosine-3'-phosphorothioate
  modified_base 2: mod_base = OTHER; note = 2'-deoxythimidine-3'-phosphorothioate
  modified_base 3: mod_base = OTHER; note = 2'-O-methylguanosine-3'-phosphate
  modified_base 4: mod_base = OTHER; note = 2'-O-methyluridine-3'-phosphate
  modified_base 6: mod_base = OTHER; note = 2'-O-methylcytidine-3'-phosphate
  modified_base 8: mod_base = OTHER; note = 2'-O-methyluridine-3'-phosphate
  modified_base 9: mod_base = OTHER; note = 2'-O-methylguanosine-3'-phosphate
  modified_base 10: mod_base = OTHER; note = 2'-O-methyladenosine-3'-phosphate
  modified_base 11: mod_base = OTHER; note = 2'-O-methylcytidine-3'-phosphate
  modified_base 13: mod_base = OTHER; note = 2'-O-methylcytidine-3'-phosphate
  modified_base 14: mod_base = OTHER; note = 2'-fluorouridine-3'-phosphate
  modified_base 15: mod_base = OTHER; note = 2'-O-methylcytidine-3'-phosphate
  modified_base 16: mod_base = OTHER; note = 2'-O-methyladenosine-3'-phosphate
  modified_base 17: mod_base = OTHER; note = 2'-O-methylcytidine-3'-phosphate
  modified_base 18: mod_base = OTHER; note = 2'-O-methyladenosine-3'-phosphate
  modified_base 19: mod_base = OTHER; note = 2'-O-methylguanosine-3'-phosphate
  modified_base 20: mod_base = OTHER; note = 2'-O-methylcytidine-3'-phosphate
  modified_base 21: mod_base = OTHER; note = 2'-O-methyluridine-3'-phosphorothioate
  modified_base 22: mod_base = OTHER; note = 2'-O-methylcytidine-3'-phosphorothioate
  modified_base 23: mod_base = OTHER; note = 2'-O-methyladenosine-3'-phosphate
  misc_feature 1: note = RNA
  misc_feature 2: note = DNA
  misc_feature 3..4: note = RNA
  misc_feature 5: note = DNA
  misc_feature 6: note = RNA
  misc_feature 7: note = DNA
  misc_feature 8..11: note = RNA
  misc_feature 12: note = DNA
  misc_feature 13..23: note = RNA
atgtgcttgaccctcacagctca

SEQ ID NO: 7243 - DNA, 23 bp, synthetic construct
  source 1..23: mol_type = other DNA
  modified_base 1: mod_base = OTHER; note = 2'-O-methyladenosine-3'-phosphorothioate
  modified_base 2: mod_base = OTHER; note = 2'-deoxycytidine-3'-phosphorothioate
  modified_base 3: mod_base = OTHER; note = 2'-O-methyluridine-3'-phosphate
  modified_base 4: mod_base = OTHER; note = 2'-O-methylguanosine-3'-phosphate
  modified_base 6: mod_base = OTHER; note = 2'-O-methylguanosine-3'-phosphate
  modified_base 8: mod_base = OTHER; note = 2'-O-methyluridine-3'-phosphate
  modified_base 9: mod_base = OTHER; note = 2'-O-methyluridine-3'-phosphate
  modified_base 10: mod_base = OTHER; note = 2'-O-methylguanosine-3'-phosphate
  modified_base 11: mod_base = OTHER; note = 2'-O-methyladenosine-3'-phosphate
  modified_base 13: mod_base = OTHER; note = 2'-O-methylcytidine-3'-phosphate
  modified_base 14: mod_base = OTHER; note = 2'-fluorocytidine-3'-phosphate
  modified_base 15: mod_base = OTHER; note = 2'-O-methyluridine-3'-phosphate
  modified_base 16: mod_base = OTHER; note = 2'-O-methylcytidine-3'-phosphate
  modified_base 17: mod_base = OTHER; note = 2'-O-methyladenosine-3'-phosphate
  modified_base 18: mod_base = OTHER; note = 2'-O-methylcytidine-3'-phosphate
  modified_base 19: mod_base = OTHER; note = 2'-O-methyladenosine-3'-phosphate
  modified_base 20: mod_base = OTHER; note = 2'-O-methylguanosine-3'-phosphate
  modified_base 21: mod_base = OTHER; note = 2'-O-methylcytidine-3'-phosphorothioate
  modified_base 22: mod_base = OTHER; note = 2'-O-methyluridine-3'-phosphorothioate
  modified_base 23: mod_base = OTHER; note = 2'-O-methylcytidine-3'-phosphate
  misc_feature 1: note = RNA
  misc_feature 2: note = DNA
  misc_feature 3..4: note = RNA
  misc_feature 5: note = DNA
  misc_feature 6: note = RNA
  misc_feature 7: note = DNA
  misc_feature 8..11: note = RNA
  misc_feature 12: note = DNA
  misc_feature 13..23: note = RNA
actgtgcttgaccctcacagctc

SEQ ID NO: 7244 - DNA, 23 bp, synthetic construct
  source 1..23: mol_type = other DNA
  modified_base 1: mod_base = OTHER; note = 2'-O-methyladenosine-3'-phosphorothioate
  modified_base 2: mod_base = OTHER; note = 2'-deoxyguanosine-3'-phosphorothioate
  modified_base 3: mod_base = OTHER; note = 2'-O-methylcytidine-3'-phosphate
  modified_base 4: mod_base = OTHER; note = 2'-O-methyluridine-3'-phosphate
  modified_base 6: mod_base = OTHER; note = 2'-O-methyluridine-3'-phosphate
  modified_base 8: mod_base = OTHER; note = 2'-O-methylcytidine-3'-phosphate
  modified_base 9: mod_base = OTHER; note = 2'-O-methyluridine-3'-phosphate
  modified_base 10: mod_base = OTHER; note = 2'-O-methyluridine-3'-phosphate
  modified_base 11: mod_base = OTHER; note = 2'-O-methylguanosine-3'-phosphate
  modified_base 13: mod_base = OTHER; note = 2'-O-methylcytidine-3'-phosphate
  modified_base 14: mod_base = OTHER; note = 2'-fluorocytidine-3'-phosphate
  modified_base 15: mod_base = OTHER; note = 2'-O-methylcytidine-3'-phosphate
  modified_base 16: mod_base = OTHER; note = 2'-O-methyluridine-3'-phosphate
  modified_base 17: mod_base = OTHER; note = 2'-O-methylcytidine-3'-phosphate
  modified_base 18: mod_base = OTHER; note = 2'-O-methyladenosine-3'-phosphate
  modified_base 19: mod_base = OTHER; note = 2'-O-methylcytidine-3'-phosphate
  modified_base 20: mod_base = OTHER; note = 2'-O-methyladenosine-3'-phosphate
  modified_base 21: mod_base = OTHER; note = 2'-O-methylguanosine-3'-phosphorothioate
  modified_base 22: mod_base = OTHER; note = 2'-O-methylcytidine-3'-phosphorothioate
  modified_base 23: mod_base = OTHER; note = 2'-O-methyluridine-3'-phosphate
  misc_feature 1: note = RNA
  misc_feature 2: note = DNA
  misc_feature 3..4: note = RNA
  misc_feature 5: note = DNA
  misc_feature 6: note = RNA
  misc_feature 7: note = DNA
  misc_feature 8..11: note = RNA
  misc_feature 12: note = DNA
  misc_feature 13..23: note = RNA
agctgtgcttgaccctcacagct

SEQ ID NO: 7245 - DNA, 23 bp, synthetic construct
  source 1..23: mol_type = other DNA
  modified_base 1: mod_base = OTHER; note = 2'-O-methyladenosine-3'-phosphorothioate
  modified_base 2: mod_base = OTHER; note = 2'-deoxyadenosine-3'-phosphorothioate
  modified_base 3: mod_base = OTHER; note = 2'-O-methylguanosine-3'-phosphate
  modified_base 4: mod_base = OTHER; note = 2'-O-methylcytidine-3'-phosphate
  modified_base 6: mod_base = OTHER; note = 2'-O-methylguanosine-3'-phosphate
  modified_base 8: mod_base = OTHER; note = 2'-O-methylguanosine-3'-phosphate
  modified_base 9: mod_base = OTHER; note = 2'-O-methylcytidine-3'-phosphate
  modified_base 10: mod_base = OTHER; note = 2'-O-methyluridine-3'-phosphate
  modified_base 11: mod_base = OTHER; note = 2'-O-methyluridine-3'-phosphate
  modified_base 13: mod_base = OTHER; note = 2'-O-methyladenosine-3'-phosphate
  modified_base 14: mod_base = OTHER; note = 2'-fluorocytidine-3'-phosphate
  modified_base 15: mod_base = OTHER; note = 2'-O-methylcytidine-3'-phosphate
  modified_base 16: mod_base = OTHER; note = 2'-O-methylcytidine-3'-phosphate
  modified_base 17: mod_base = OTHER; note = 2'-O-methyluridine-3'-phosphate
  modified_base 18: mod_base = OTHER; note = 2'-O-methylcytidine-3'-phosphate
  modified_base 19: mod_base = OTHER; note = 2'-O-methyladenosine-3'-phosphate
  modified_base 20: mod_base = OTHER; note = 2'-O-methylcytidine-3'-phosphate
  modified_base 21: mod_base = OTHER; note = 2'-O-methyladenosine-3'-phosphorothioate
  modified_base 22: mod_base = OTHER; note = 2'-O-methylguanosine-3'-phosphorothioate
  modified_base 23: mod_base = OTHER; note = 2'-O-methylcytidine-3'-phosphate
  misc_feature 1: note = RNA
  misc_feature 2: note = DNA
  misc_feature 3..4: note = RNA
  misc_feature 5: note = DNA
  misc_feature 6: note = RNA
  misc_feature 7: note = DNA
  misc_feature 8..11: note = RNA
  misc_feature 12: note = DNA
  misc_feature 13..23: note = RNA
aagctgtgcttgaccctcacagc

SEQ ID NO: 7246 - DNA, 23 bp, synthetic construct
  source 1..23: mol_type = other DNA
  modified_base 1: mod_base = OTHER; note = 2'-O-methyladenosine-3'-phosphorothioate
  modified_base 2: mod_base = OTHER; note = 2'-deoxythimidine-3'-phosphorothioate
  modified_base 3: mod_base = OTHER; note = 2'-O-methyladenosine-3'-phosphate
  modified_base 4: mod_base = OTHER; note = 2'-O-methylguanosine-3'-phosphate
  modified_base 6: mod_base = OTHER; note = 2'-O-methyluridine-3'-phosphate
  modified_base 8: mod_base = OTHER; note = 2'-O-methyluridine-3'-phosphate
  modified_base 9: mod_base = OTHER; note = 2'-O-methylguanosine-3'-phosphate
  modified_base 10: mod_base = OTHER; note = 2'-O-methylcytidine-3'-phosphate
  modified_base 11: mod_base = OTHER; note = 2'-O-methyluridine-3'-phosphate
  modified_base 13: mod_base = OTHER; note = 2'-O-methylguanosine-3'-phosphate
  modified_base 14: mod_base = OTHER; note = 2'-fluoroadenosine-3'-phosphate
  modified_base 15: mod_base = OTHER; note = 2'-O-methylcytidine-3'-phosphate
  modified_base 16: mod_base = OTHER; note = 2'-O-methylcytidine-3'-phosphate
  modified_base 17: mod_base = OTHER; note = 2'-O-methylcytidine-3'-phosphate
  modified_base 18: mod_base = OTHER; note = 2'-O-methyluridine-3'-phosphate
  modified_base 19: mod_base = OTHER; note = 2'-O-methylcytidine-3'-phosphate
  modified_base 20: mod_base = OTHER; note = 2'-O-methyladenosine-3'-phosphate
  modified_base 21: mod_base = OTHER; note = 2'-O-methylcytidine-3'-phosphorothioate
  modified_base 22: mod_base = OTHER; note = 2'-O-methyladenosine-3'-phosphorothioate
  modified_base 23: mod_base = OTHER; note = 2'-O-methylguanosine-3'-phosphate
  misc_feature 1: note = RNA
  misc_feature 2: note = DNA
  misc_feature 3..4: note = RNA
  misc_feature 5: note = DNA
  misc_feature 6: note = RNA
  misc_feature 7: note = DNA
  misc_feature 8..11: note = RNA
  misc_feature 12: note = DNA
  misc_feature 13..23: note = RNA
atagctgtgcttgaccctcacag

SEQ ID NO: 7247 - DNA, 23 bp, synthetic construct
  source 1..23: mol_type = other DNA
  modified_base 1: mod_base = OTHER; note = 2'-O-methyladenosine-3'-phosphorothioate
  modified_base 2: mod_base = OTHER; note = 2'-deoxyadenosine-3'-phosphorothioate
  modified_base 3: mod_base = OTHER; note = 2'-O-methyluridine-3'-phosphate
  modified_base 4: mod_base = OTHER; note = 2'-O-methyladenosine-3'-phosphate
  modified_base 6: mod_base = OTHER; note = 2'-O-methylcytidine-3'-phosphate
  modified_base 8: mod_base = OTHER; note = 2'-O-methylguanosine-3'-phosphate
  modified_base 9: mod_base = OTHER; note = 2'-O-methyluridine-3'-phosphate
  modified_base 10: mod_base = OTHER; note = 2'-O-methylguanosine-3'-phosphate
  modified_base 11: mod_base = OTHER; note = 2'-O-methylcytidine-3'-phosphate
  modified_base 13: mod_base = OTHER; note = 2'-O-methyluridine-3'-phosphate
  modified_base 14: mod_base = OTHER; note = 2'-fluoroguanosine-3'-phosphate
  modified_base 15: mod_base = OTHER; note = 2'-O-methyladenosine-3'-phosphate
  modified_base 16: mod_base = OTHER; note = 2'-O-methylcytidine-3'-phosphate
  modified_base 17: mod_base = OTHER; note = 2'-O-methylcytidine-3'-phosphate
  modified_base 18: mod_base = OTHER; note = 2'-O-methylcytidine-3'-phosphate
  modified_base 19: mod_base = OTHER; note = 2'-O-methyluridine-3'-phosphate
  modified_base 20: mod_base = OTHER; note = 2'-O-methylcytidine-3'-phosphate
  modified_base 21: mod_base = OTHER; note = 2'-O-methyladenosine-3'-phosphorothioate
  modified_base 22: mod_base = OTHER; note = 2'-O-methylcytidine-3'-phosphorothioate
  modified_base 23: mod_base = OTHER; note = 2'-O-methyladenosine-3'-phosphate
  misc_feature 1: note = RNA
  misc_feature 2: note = DNA
  misc_feature 3..4: note = RNA
  misc_feature 5: note = DNA
  misc_feature 6: note = RNA
  misc_feature 7: note = DNA
  misc_feature 8..11: note = RNA
  misc_feature 12: note = DNA
  misc_feature 13..23: note = RNA
aatagctgtgcttgaccctcaca

SEQ ID NO: 7248 - DNA, 23 bp, synthetic construct
  source 1..23: mol_type = other DNA
  modified_base 1: mod_base = OTHER; note = 2'-O-methyladenosine-3'-phosphorothioate
  modified_base 2: mod_base = OTHER; note = 2'-deoxyguanosine-3'-phosphorothioate
  modified_base 3: mod_base = OTHER; note = 2'-O-methyladenosine-3'-phosphate
  modified_base 4: mod_base = OTHER; note = 2'-O-methyluridine-3'-phosphate
  modified_base 6: mod_base = OTHER; note = 2'-O-methylguanosine-3'-phosphate
  modified_base 8: mod_base = OTHER; note = 2'-O-methyluridine-3'-phosphate
  modified_base 9: mod_base = OTHER; note = 2'-O-methylguanosine-3'-phosphate
  modified_base 10: mod_base = OTHER; note = 2'-O-methyluridine-3'-phosphate
  modified_base 11: mod_base = OTHER; note = 2'-O-methylguanosine-3'-phosphate
  modified_base 13: mod_base = OTHER; note = 2'-O-methyluridine-3'-phosphate
  modified_base 14: mod_base = OTHER; note = 2'-fluorouridine-3'-phosphate
  modified_base 15: mod_base = OTHER; note = 2'-O-methylguanosine-3'-phosphate
  modified_base 16: mod_base = OTHER; note = 2'-O-methyladenosine-3'-phosphate
  modified_base 17: mod_base = OTHER; note = 2'-O-methylcytidine-3'-phosphate
  modified_base 18: mod_base = OTHER; note = 2'-O-methylcytidine-3'-phosphate
  modified_base 19: mod_base = OTHER; note = 2'-O-methylcytidine-3'-phosphate
  modified_base 20: mod_base = OTHER; note = 2'-O-methyluridine-3'-phosphate
  modified_base 21: mod_base = OTHER; note = 2'-O-methylcytidine-3'-phosphorothioate
  modified_base 22: mod_base = OTHER; note = 2'-O-methyladenosine-3'-phosphorothioate
  modified_base 23: mod_base = OTHER; note = 2'-O-methylcytidine-3'-phosphate
  misc_feature 1: note = RNA
  misc_feature 2: note = DNA
  misc_feature 3..4: note = RNA
  misc_feature 5: note = DNA
  misc_feature 6: note = RNA
  misc_feature 7: note = DNA
  misc_feature 8..11: note = RNA
  misc_feature 12: note = DNA
  misc_feature 13..23: note = RNA
agatagctgtgcttgaccctcac

SEQ ID NO: 7249 - DNA, 23 bp, synthetic construct
  source 1..23: mol_type = other DNA
  modified_base 1: mod_base = OTHER; note = 2'-O-methyladenosine-3'-phosphorothioate
  modified_base 2: mod_base = OTHER; note = 2'-deoxyguanosine-3'-phosphorothioate
  modified_base 3: mod_base = OTHER; note = 2'-O-methylguanosine-3'-phosphate
  modified_base 4: mod_base = OTHER; note = 2'-O-methyladenosine-3'-phosphate
  modified_base 6: mod_base = OTHER; note = 2'-O-methyladenosine-3'-phosphate
  modified_base 8: mod_base = OTHER; note = 2'-O-methylcytidine-3'-phosphate
  modified_base 9: mod_base = OTHER; note = 2'-O-methyluridine-3'-phosphate
  modified_base 10: mod_base = OTHER; note = 2'-O-methylguanosine-3'-phosphate
  modified_base 11: mod_base = OTHER; note = 2'-O-methyluridine-3'-phosphate
  modified_base 13: mod_base = OTHER; note = 2'-O-methylcytidine-3'-phosphate
  modified_base 14: mod_base = OTHER; note = 2'-fluorouridine-3'-phosphate
  modified_base 15: mod_base = OTHER; note = 2'-O-methyluridine-3'-phosphate
  modified_base 16: mod_base = OTHER; note = 2'-O-methylguanosine-3'-phosphate
  modified_base 17: mod_base = OTHER; note = 2'-O-methyladenosine-3'-phosphate
  modified_base 18: mod_base = OTHER; note = 2'-O-methylcytidine-3'-phosphate
  modified_base 19: mod_base = OTHER; note = 2'-O-methylcytidine-3'-phosphate
  modified_base 20: mod_base = OTHER; note = 2'-O-methylcytidine-3'-phosphate
  modified_base 21: mod_base = OTHER; note = 2'-O-methyluridine-3'-phosphorothioate
  modified_base 22: mod_base = OTHER; note = 2'-O-methylcytidine-3'-phosphorothioate
  modified_base 23: mod_base = OTHER; note = 2'-O-methyladenosine-3'-phosphate
  misc_feature 1: note = RNA
  misc_feature 2: note = DNA
  misc_feature 3..4: note = RNA
  misc_feature 5: note = DNA
  misc_feature 6: note = RNA
  misc_feature 7: note = DNA
  misc_feature 8..11: note = RNA
  misc_feature 12: note = DNA
  misc_feature 13..23: note = RNA
aggatagctgtgcttgaccctca

SEQ ID NO: 7250 - DNA, 23 bp, synthetic construct
  source 1..23: mol_type = other DNA
  modified_base 1: mod_base = OTHER; note = 2'-O-methyladenosine-3'-phosphorothioate
  modified_base 2: mod_base = OTHER; note = 2'-deoxythimidine-3'-phosphorothioate
  modified_base 3: mod_base = OTHER; note = 2'-O-methylguanosine-3'-phosphate
  modified_base 4: mod_base = OTHER; note = 2'-O-methylguanosine-3'-phosphate
  modified_base 6: mod_base = OTHER; note = 2'-O-methyluridine-3'-phosphate
  modified_base 8: mod_base = OTHER; note = 2'-O-methylguanosine-3'-phosphate
  modified_base 9: mod_base = OTHER; note = 2'-O-methylcytidine-3'-phosphate
  modified_base 10: mod_base = OTHER; note = 2'-O-methyluridine-3'-phosphate
  modified_base 11: mod_base = OTHER; note = 2'-O-methylguanosine-3'-phosphate
  modified_base 13: mod_base = OTHER; note = 2'-O-methylguanosine-3'-phosphate
  modified_base 14: mod_base = OTHER; note = 2'-fluorocytidine-3'-phosphate
  modified_base 15: mod_base = OTHER; note = 2'-O-methyluridine-3'-phosphate
  modified_base 16: mod_base = OTHER; note = 2'-O-methyluridine-3'-phosphate
  modified_base 17: mod_base = OTHER; note = 2'-O-methylguanosine-3'-phosphate
  modified_base 18: mod_base = OTHER; note = 2'-O-methyladenosine-3'-phosphate
  modified_base 19: mod_base = OTHER; note = 2'-O-methylcytidine-3'-phosphate
  modified_base 20: mod_base = OTHER; note = 2'-O-methylcytidine-3'-phosphate
  modified_base 21: mod_base = OTHER; note = 2'-O-methylcytidine-3'-phosphorothioate
  modified_base 22: mod_base = OTHER; note = 2'-O-methyluridine-3'-phosphorothioate
  modified_base 23: mod_base = OTHER; note = 2'-O-methylcytidine-3'-phosphate
  misc_feature 1: note = RNA
  misc_feature 2: note = DNA
  misc_feature 3..4: note = RNA
  misc_feature 5: note = DNA
  misc_feature 6: note = RNA
  misc_feature 7: note = DNA
  misc_feature 8..11: note = RNA
  misc_feature 12: note = DNA
  misc_feature 13..23: note = RNA
atggatagctgtgcttgaccctc

SEQ ID NO: 7251 - DNA, 23 bp, synthetic construct
  source 1..23: mol_type = other DNA
  modified_base 1: mod_base = OTHER; note = 2'-O-methyladenosine-3'-phosphorothioate
  modified_base 2: mod_base = OTHER; note = 2'-deoxycytidine-3'-phosphorothioate
  modified_base 3: mod_base = OTHER; note = 2'-O-methyluridine-3'-phosphate
  modified_base 4: mod_base = OTHER; note = 2'-O-methylguanosine-3'-phosphate
  modified_base 6: mod_base = OTHER; note = 2'-O-methyluridine-3'-phosphate
  modified_base 8: mod_base = OTHER; note = 2'-O-methylguanosine-3'-phosphate
  modified_base 9: mod_base = OTHER; note = 2'-O-methyladenosine-3'-phosphate
  modified_base 10: mod_base = OTHER; note = 2'-O-methyluridine-3'-phosphate
  modified_base 11: mod_base = OTHER; note = 2'-O-methyladenosine-3'-phosphate
  modified_base 13: mod_base = OTHER; note = 2'-O-methylcytidine-3'-phosphate
  modified_base 14: mod_base = OTHER; note = 2'-fluorouridine-3'-phosphate
  modified_base 15: mod_base = OTHER; note = 2'-O-methylguanosine-3'-phosphate
  modified_base 16: mod_base = OTHER; note = 2'-O-methyluridine-3'-phosphate
  modified_base 17: mod_base = OTHER; note = 2'-O-methylguanosine-3'-phosphate
  modified_base 18: mod_base = OTHER; note = 2'-O-methylcytidine-3'-phosphate
  modified_base 19: mod_base = OTHER; note = 2'-O-methyluridine-3'-phosphate
  modified_base 20: mod_base = OTHER; note = 2'-O-methyluridine-3'-phosphate
  modified_base 21: mod_base = OTHER; note = 2'-O-methylguanosine-3'-phosphorothioate
  modified_base 22: mod_base = OTHER; note = 2'-O-methyladenosine-3'-phosphorothioate
  modified_base 23: mod_base = OTHER; note = 2'-O-methylcytidine-3'-phosphate
  misc_feature 1: note = RNA
  misc_feature 2: note = DNA
  misc_feature 3..4: note = RNA
  misc_feature 5: note = DNA
  misc_feature 6: note = RNA
  misc_feature 7: note = DNA
  misc_feature 8..11: note = RNA
  misc_feature 12: note = DNA
  misc_feature 13..23: note = RNA
actgatggatagctgtgcttgac

SEQ ID NO: 7252 - DNA, 23 bp, synthetic construct
  source 1..23: mol_type = other DNA
  modified_base 1: mod_base = OTHER; note = 2'-O-methyladenosine-3'-phosphorothioate
  modified_base 2: mod_base = OTHER; note = 2'-deoxythimidine-3'-phosphorothioate
  modified_base 3: mod_base = OTHER; note = 2'-O-methylcytidine-3'-phosphate
  modified_base 4: mod_base = OTHER; note = 2'-O-methyluridine-3'-phosphate
  modified_base 6: mod_base = OTHER; note = 2'-O-methyladenosine-3'-phosphate
  modified_base 8: mod_base = OTHER; note = 2'-O-methylguanosine-3'-phosphate
  modified_base 9: mod_base = OTHER; note = 2'-O-methylguanosine-3'-phosphate
  modified_base 10: mod_base = OTHER; note = 2'-O-methyladenosine-3'-phosphate
  modified_base 11: mod_base = OTHER; note = 2'-O-methyluridine-3'-phosphate
  modified_base 13: mod_base = OTHER; note = 2'-O-methylguanosine-3'-phosphate
  modified_base 14: mod_base = OTHER; note = 2'-fluorocytidine-3'-phosphate
  modified_base 15: mod_base = OTHER; note = 2'-O-methyluridine-3'-phosphate
  modified_base 16: mod_base = OTHER; note = 2'-O-methylguanosine-3'-phosphate
  modified_base 17: mod_base = OTHER; note = 2'-O-methyluridine-3'-phosphate
  modified_base 18: mod_base = OTHER; note = 2'-O-methylguanosine-3'-phosphate
  modified_base 19: mod_base = OTHER; note = 2'-O-methylcytidine-3'-phosphate
  modified_base 20: mod_base = OTHER; note = 2'-O-methyluridine-3'-phosphate
  modified_base 21: mod_base = OTHER; note = 2'-O-methyluridine-3'-phosphorothioate
  modified_base 22: mod_base = OTHER; note = 2'-O-methylguanosine-3'-phosphorothioate
  modified_base 23: mod_base = OTHER; note = 2'-O-methyladenosine-3'-phosphate
  misc_feature 1: note = RNA
  misc_feature 2: note = DNA
  misc_feature 3..4: note = RNA
  misc_feature 5: note = DNA
  misc_feature 6: note = RNA
  misc_feature 7: note = DNA
  misc_feature 8..11: note = RNA
  misc_feature 12: note = DNA
  misc_feature 13..23: note = RNA
atctgatggatagctgtgcttga

SEQ ID NO: 7253 - DNA, 23 bp, synthetic construct
  source 1..23: mol_type = other DNA
  modified_base 1: mod_base = OTHER; note = 2'-O-methyladenosine-3'-phosphorothioate
  modified_base 2: mod_base = OTHER; note = 2'-deoxycytidine-3'-phosphorothioate
  modified_base 3: mod_base = OTHER; note = 2'-O-methyladenosine-3'-phosphate
  modified_base 4: mod_base = OTHER; note = 2'-O-methyluridine-3'-phosphate
  modified_base 6: mod_base = OTHER; note = 2'-O-methyluridine-3'-phosphate
  modified_base 8: mod_base = OTHER; note = 2'-O-methyladenosine-3'-phosphate
  modified_base 9: mod_base = OTHER; note = 2'-O-methyluridine-3'-phosphate
  modified_base 10: mod_base = OTHER; note = 2'-O-methylguanosine-3'-phosphate
  modified_base 11: mod_base = OTHER; note = 2'-O-methylguanosine-3'-phosphate
  modified_base 13: mod_base = OTHER; note = 2'-O-methyluridine-3'-phosphate
  modified_base 14: mod_base = OTHER; note = 2'-fluoroadenosine-3'-phosphate
  modified_base 15: mod_base = OTHER; note = 2'-O-methylguanosine-3'-phosphate
  modified_base 16: mod_base = OTHER; note = 2'-O-methylcytidine-3'-phosphate
  modified_base 17: mod_base = OTHER; note = 2'-O-methyluridine-3'-phosphate
  modified_base 18: mod_base = OTHER; note = 2'-O-methylguanosine-3'-phosphate
  modified_base 19: mod_base = OTHER; note = 2'-O-methyluridine-3'-phosphate
  modified_base 20: mod_base = OTHER; note = 2'-O-methylguanosine-3'-phosphate
  modified_base 21: mod_base = OTHER; note = 2'-O-methylcytidine-3'-phosphorothioate
  modified_base 22: mod_base = OTHER; note = 2'-O-methyluridine-3'-phosphorothioate
  modified_base 23: mod_base = OTHER; note = 2'-O-methyluridine-3'-phosphate
  misc_feature 1: note = RNA
  misc_feature 2: note = DNA
  misc_feature 3..4: note = RNA
  misc_feature 5: note = DNA
  misc_feature 6: note = RNA
  misc_feature 7: note = DNA
  misc_feature 8..11: note = RNA
  misc_feature 12: note = DNA
  misc_feature 13..23: note = RNA
acatctgatggatagctgtgctt

SEQ ID NO: 7254 - DNA, 23 bp, synthetic construct
  source 1..23: mol_type = other DNA
  modified_base 1: mod_base = OTHER; note = 2'-O-methyladenosine-3'-phosphorothioate
  modified_base 2: mod_base = OTHER; note = 2'-deoxythimidine-3'-phosphorothioate
  modified_base 3: mod_base = OTHER; note = 2'-O-methylcytidine-3'-phosphate
  modified_base 4: mod_base = OTHER; note = 2'-O-methyladenosine-3'-phosphate
  modified_base 6: mod_base = OTHER; note = 2'-O-methylcytidine-3'-phosphate
  modified_base 8: mod_base = OTHER; note = 2'-O-methylguanosine-3'-phosphate
  modified_base 9: mod_base = OTHER; note = 2'-O-methyladenosine-3'-phosphate
  modified_base 10: mod_base = OTHER; note = 2'-O-methyluridine-3'-phosphate
  modified_base 11: mod_base = OTHER; note = 2'-O-methylguanosine-3'-phosphate
  modified_base 13: mod_base = OTHER; note = 2'-O-methyladenosine-3'-phosphate
  modified_base 14: mod_base = OTHER; note = 2'-fluorouridine-3'-phosphate
  modified_base 15: mod_base = OTHER; note = 2'-O-methyladenosine-3'-phosphate
  modified_base 16: mod_base = OTHER; note = 2'-O-methylguanosine-3'-phosphate
  modified_base 17: mod_base = OTHER; note = 2'-O-methylcytidine-3'-phosphate
  modified_base 18: mod_base = OTHER; note = 2'-O-methyluridine-3'-phosphate
  modified_base 19: mod_base = OTHER; note = 2'-O-methylguanosine-3'-phosphate
  modified_base 20: mod_base = OTHER; note = 2'-O-methyluridine-3'-phosphate
  modified_base 21: mod_base = OTHER; note = 2'-O-methylguanosine-3'-phosphorothioate
  modified_base 22: mod_base = OTHER; note = 2'-O-methylcytidine-3'-phosphorothioate
  modified_base 23: mod_base = OTHER; note = 2'-O-methyluridine-3'-phosphate
  misc_feature 1: note = RNA
  misc_feature 2: note = DNA
  misc_feature 3..4: note = RNA
  misc_feature 5: note = DNA
  misc_feature 6: note = RNA
  misc_feature 7: note = DNA
  misc_feature 8..11: note = RNA
  misc_feature 12: note = DNA
  misc_feature 13..23: note = RNA
atcatctgatggatagctgtgct

SEQ ID NO: 7255 - DNA, 23 bp, synthetic construct
  source 1..23: mol_type = other DNA
  modified_base 1: mod_base = OTHER; note = 2'-O-methyladenosine-3'-phosphorothioate
  modified_base 2: mod_base = OTHER; note = 2'-deoxyadenosine-3'-phosphorothioate
  modified_base 3: mod_base = OTHER; note = 2'-O-methyluridine-3'-phosphate
  modified_base 4: mod_base = OTHER; note = 2'-O-methylcytidine-3'-phosphate
  modified_base 6: mod_base = OTHER; note = 2'-O-methyluridine-3'-phosphate
  modified_base 8: mod_base = OTHER; note = 2'-O-methyluridine-3'-phosphate
  modified_base 9: mod_base = OTHER; note = 2'-O-methylguanosine-3'-phosphate
  modified_base 10: mod_base = OTHER; note = 2'-O-methyladenosine-3'-phosphate
  modified_base 11: mod_base = OTHER; note = 2'-O-methyluridine-3'-phosphate
  modified_base 13: mod_base = OTHER; note = 2'-O-methylguanosine-3'-phosphate
  modified_base 14: mod_base = OTHER; note = 2'-fluoroadenosine-3'-phosphate
  modified_base 15: mod_base = OTHER; note = 2'-O-methyluridine-3'-phosphate
  modified_base 16: mod_base = OTHER; note = 2'-O-methyladenosine-3'-phosphate
  modified_base 17: mod_base = OTHER; note = 2'-O-methylguanosine-3'-phosphate
  modified_base 18: mod_base = OTHER; note = 2'-O-methylcytidine-3'-phosphate
  modified_base 19: mod_base = OTHER; note = 2'-O-methyluridine-3'-phosphate
  modified_base 20: mod_base = OTHER; note = 2'-O-methylguanosine-3'-phosphate
  modified_base 21: mod_base = OTHER; note = 2'-O-methyluridine-3'-phosphorothioate
  modified_base 22: mod_base = OTHER; note = 2'-O-methylguanosine-3'-phosphorothioate
  modified_base 23: mod_base = OTHER; note = 2'-O-methylcytidine-3'-phosphate
  misc_feature 1: note = RNA
  misc_feature 2: note = DNA
  misc_feature 3..4: note = RNA
  misc_feature 5: note = DNA
  misc_feature 6: note = RNA
  misc_feature 7: note = DNA
  misc_feature 8..11: note = RNA
  misc_feature 12: note = DNA
  misc_feature 13..23: note = RNA
aatcatctgatggatagctgtgc

SEQ ID NO: 7256 - DNA, 23 bp, synthetic construct
  source 1..23: mol_type = other DNA
  modified_base 1: mod_base = OTHER; note = 2'-O-methyladenosine-3'-phosphorothioate
  modified_base 2: mod_base = OTHER; note = 2'-deoxyguanosine-3'-phosphorothioate
  modified_base 3: mod_base = OTHER; note = 2'-O-methyladenosine-3'-phosphate
  modified_base 4: mod_base = OTHER; note = 2'-O-methyluridine-3'-phosphate
  modified_base 6: mod_base = OTHER; note = 2'-O-methyladenosine-3'-phosphate
  modified_base 8: mod_base = OTHER; note = 2'-O-methylcytidine-3'-phosphate
  modified_base 9: mod_base = OTHER; note = 2'-O-methyluridine-3'-phosphate
  modified_base 10: mod_base = OTHER; note = 2'-O-methylguanosine-3'-phosphate
  modified_base 11: mod_base = OTHER; note = 2'-O-methyladenosine-3'-phosphate
  modified_base 13: mod_base = OTHER; note = 2'-O-methylguanosine-3'-phosphate
  modified_base 14: mod_base = OTHER; note = 2'-fluoroguanosine-3'-phosphate
  modified_base 15: mod_base = OTHER; note = 2'-O-methyladenosine-3'-phosphate
  modified_base 16: mod_base = OTHER; note = 2'-O-methyluridine-3'-phosphate
  modified_base 17: mod_base = OTHER; note = 2'-O-methyladenosine-3'-phosphate
  modified_base 18: mod_base = OTHER; note = 2'-O-methylguanosine-3'-phosphate
  modified_base 19: mod_base = OTHER; note = 2'-O-methylcytidine-3'-phosphate
  modified_base 20: mod_base = OTHER; note = 2'-O-methyluridine-3'-phosphate
  modified_base 21: mod_base = OTHER; note = 2'-O-methylguanosine-3'-phosphorothioate
  modified_base 22: mod_base = OTHER; note = 2'-O-methyluridine-3'-phosphorothioate
  modified_base 23: mod_base = OTHER; note = 2'-O-methylguanosine-3'-phosphate
  misc_feature 1: note = RNA
  misc_feature 2: note = DNA
  misc_feature 3..4: note = RNA
  misc_feature 5: note = DNA
  misc_feature 6: note = RNA
  misc_feature 7: note = DNA
  misc_feature 8..11: note = RNA
  misc_feature 12: note = DNA
  misc_feature 13..23: note = RNA
agatcatctgatggatagctgtg

SEQ ID NO: 7257 - DNA, 23 bp, synthetic construct
  source 1..23: mol_type = other DNA
  modified_base 1: mod_base = OTHER; note = 2'-O-methyladenosine-3'-phosphorothioate
  modified_base 2: mod_base = OTHER; note = 2'-deoxyadenosine-3'-phosphorothioate
  modified_base 3: mod_base = OTHER; note = 2'-O-methylguanosine-3'-phosphate
  modified_base 4: mod_base = OTHER; note = 2'-O-methyladenosine-3'-phosphate
  modified_base 6: mod_base = OTHER; note = 2'-O-methylcytidine-3'-phosphate
  modified_base 8: mod_base = OTHER; note = 2'-O-methyluridine-3'-phosphate
  modified_base 9: mod_base = OTHER; note = 2'-O-methylcytidine-3'-phosphate
  modified_base 10: mod_base = OTHER; note = 2'-O-methyluridine-3'-phosphate
  modified_base 11: mod_base = OTHER; note = 2'-O-methylguanosine-3'-phosphate
  modified_base 13: mod_base = OTHER; note = 2'-O-methyluridine-3'-phosphate
  modified_base 14: mod_base = OTHER; note = 2'-fluoroguanosine-3'-phosphate
  modified_base 15: mod_base = OTHER; note = 2'-O-methylguanosine-3'-phosphate
  modified_base 16: mod_base = OTHER; note = 2'-O-methyladenosine-3'-phosphate
  modified_base 17: mod_base = OTHER; note = 2'-O-methyluridine-3'-phosphate
  modified_base 18: mod_base = OTHER; note = 2'-O-methyladenosine-3'-phosphate
  modified_base 19: mod_base = OTHER; note = 2'-O-methylguanosine-3'-phosphate
  modified_base 20: mod_base = OTHER; note = 2'-O-methylcytidine-3'-phosphate
  modified_base 21: mod_base = OTHER; note = 2'-O-methyluridine-3'-phosphorothioate
  modified_base 22: mod_base = OTHER; note = 2'-O-methylguanosine-3'-phosphorothioate
  modified_base 23: mod_base = OTHER; note = 2'-O-methyluridine-3'-phosphate
  misc_feature 1: note = RNA
  misc_feature 2: note = DNA
  misc_feature 3..4: note = RNA
  misc_feature 5: note = DNA
  misc_feature 6: note = RNA
  misc_feature 7: note = DNA
  misc_feature 8..11: note = RNA
  misc_feature 12: note = DNA
  misc_feature 13..23: note = RNA
aagatcatctgatggatagctgt

SEQ ID NO: 7258 - DNA, 23 bp, synthetic construct
  source 1..23: mol_type = other DNA
  modified_base 1: mod_base = OTHER; note = 2'-O-methyladenosine-3'-phosphorothioate
  modified_base 2: mod_base = OTHER; note = 2'-deoxythimidine-3'-phosphorothioate
  modified_base 3: mod_base = OTHER; note = 2'-O-methyladenosine-3'-phosphate
  modified_base 4: mod_base = OTHER; note = 2'-O-methylguanosine-3'-phosphate
  modified_base 6: mod_base = OTHER; note = 2'-O-methyluridine-3'-phosphate
  modified_base 8: mod_base = OTHER; note = 2'-O-methyladenosine-3'-phosphate
  modified_base 9: mod_base = OTHER; note = 2'-O-methyluridine-3'-phosphate
  modified_base 10: mod_base = OTHER; note = 2'-O-methylcytidine-3'-phosphate
  modified_base 11: mod_base = OTHER; note = 2'-O-methyluridine-3'-phosphate
  modified_base 13: mod_base = OTHER; note = 2'-O-methyladenosine-3'-phosphate
  modified_base 14: mod_base = OTHER; note = 2'-fluorouridine-3'-phosphate
  modified_base 15: mod_base = OTHER; note = 2'-O-methylguanosine-3'-phosphate
  modified_base 16: mod_base = OTHER; note = 2'-O-methylguanosine-3'-phosphate
  modified_base 17: mod_base = OTHER; note = 2'-O-methyladenosine-3'-phosphate
  modified_base 18: mod_base = OTHER; note = 2'-O-methyluridine-3'-phosphate
  modified_base 19: mod_base = OTHER; note = 2'-O-methyladenosine-3'-phosphate
  modified_base 20: mod_base = OTHER; note = 2'-O-methylguanosine-3'-phosphate
  modified_base 21: mod_base = OTHER; note = 2'-O-methylcytidine-3'-phosphorothioate
  modified_base 22: mod_base = OTHER; note = 2'-O-methyluridine-3'-phosphorothioate
  modified_base 23: mod_base = OTHER; note = 2'-O-methylguanosine-3'-phosphate
  misc_feature 1: note = RNA
  misc_feature 2: note = DNA
  misc_feature 3..4: note = RNA
  misc_feature 5: note = DNA
  misc_feature 6: note = RNA
  misc_feature 7: note = DNA
  misc_feature 8..11: note = RNA
  misc_feature 12: note = DNA
  misc_feature 13..23: note = RNA
atagatcatctgatggatagctg

SEQ ID NO: 7259 - DNA, 23 bp, synthetic construct
  source 1..23: mol_type = other DNA
  modified_base 1: mod_base = OTHER; note = 2'-O-methyladenosine-3'-phosphorothioate
  modified_base 2: mod_base = OTHER; note = 2'-deoxyguanosine-3'-phosphorothioate
  modified_base 3: mod_base = OTHER; note = 2'-O-methyluridine-3'-phosphate
  modified_base 4: mod_base = OTHER; note = 2'-O-methyladenosine-3'-phosphate
  modified_base 6: mod_base = OTHER; note = 2'-O-methyladenosine-3'-phosphate
  modified_base 8: mod_base = OTHER; note = 2'-O-methylcytidine-3'-phosphate
  modified_base 9: mod_base = OTHER; note = 2'-O-methyladenosine-3'-phosphate
  modified_base 10: mod_base = OTHER; note = 2'-O-methyluridine-3'-phosphate
  modified_base 11: mod_base = OTHER; note = 2'-O-methylcytidine-3'-phosphate
  modified_base 13: mod_base = OTHER; note = 2'-O-methylguanosine-3'-phosphate
  modified_base 14: mod_base = OTHER; note = 2'-fluoroadenosine-3'-phosphate
  modified_base 15: mod_base = OTHER; note = 2'-O-methyluridine-3'-phosphate
  modified_base 16: mod_base = OTHER; note = 2'-O-methylguanosine-3'-phosphate
  modified_base 17: mod_base = OTHER; note = 2'-O-methylguanosine-3'-phosphate
  modified_base 18: mod_base = OTHER; note = 2'-O-methyladenosine-3'-phosphate
  modified_base 19: mod_base = OTHER; note = 2'-O-methyluridine-3'-phosphate
  modified_base 20: mod_base = OTHER; note = 2'-O-methyladenosine-3'-phosphate
  modified_base 21: mod_base = OTHER; note = 2'-O-methylguanosine-3'-phosphorothioate
  modified_base 22: mod_base = OTHER; note = 2'-O-methylcytidine-3'-phosphorothioate
  modified_base 23: mod_base = OTHER; note = 2'-O-methyluridine-3'-phosphate
  misc_feature 1: note = RNA
  misc_feature 2: note = DNA
  misc_feature 3..4: note = RNA
  misc_feature 5: note = DNA
  misc_feature 6: note = RNA
  misc_feature 7: note = DNA
  misc_feature 8..11: note = RNA
  misc_feature 12: note = DNA
  misc_feature 13..23: note = RNA
agtagatcatctgatggatagct

SEQ ID NO: 7260 - DNA, 23 bp, synthetic construct
  source 1..23: mol_type = other DNA
  modified_base 1: mod_base = OTHER; note = 2'-O-methyladenosine-3'-phosphorothioate
  modified_base 2: mod_base = OTHER; note = 2'-deoxyadenosine-3'-phosphorothioate
  modified_base 3: mod_base = OTHER; note = 2'-O-methylguanosine-3'-phosphate
  modified_base 4: mod_base = OTHER; note = 2'-O-methyluridine-3'-phosphate
  modified_base 6: mod_base = OTHER; note = 2'-O-methylguanosine-3'-phosphate
  modified_base 8: mod_base = OTHER; note = 2'-O-methyluridine-3'-phosphate
  modified_base 9: mod_base = OTHER; note = 2'-O-methylcytidine-3'-phosphate
  modified_base 10: mod_base = OTHER; note = 2'-O-methyladenosine-3'-phosphate
  modified_base 11: mod_base = OTHER; note = 2'-O-methyluridine-3'-phosphate
  modified_base 13: mod_base = OTHER; note = 2'-O-methyluridine-3'-phosphate
  modified_base 14: mod_base = OTHER; note = 2'-fluoroguanosine-3'-phosphate
  modified_base 15: mod_base = OTHER; note = 2'-O-methyladenosine-3'-phosphate
  modified_base 16: mod_base = OTHER; note = 2'-O-methyluridine-3'-phosphate
  modified_base 17: mod_base = OTHER; note = 2'-O-methylguanosine-3'-phosphate
  modified_base 18: mod_base = OTHER; note = 2'-O-methylguanosine-3'-phosphate
  modified_base 19: mod_base = OTHER; note = 2'-O-methyladenosine-3'-phosphate
  modified_base 20: mod_base = OTHER; note = 2'-O-methyluridine-3'-phosphate
  modified_base 21: mod_base = OTHER; note = 2'-O-methyladenosine-3'-phosphorothioate
  modified_base 22: mod_base = OTHER; note = 2'-O-methylguanosine-3'-phosphorothioate
  modified_base 23: mod_base = OTHER; note = 2'-O-methylcytidine-3'-phosphate
  misc_feature 1: note = RNA
  misc_feature 2: note = DNA
  misc_feature 3..4: note = RNA
  misc_feature 5: note = DNA
  misc_feature 6: note = RNA
  misc_feature 7: note = DNA
  misc_feature 8..11: note = RNA
  misc_feature 12: note = DNA
  misc_feature 13..23: note = RNA
aagtagatcatctgatggatagc

SEQ ID NO: 7261 - DNA, 23 bp, synthetic construct
  source 1..23: mol_type = other DNA
  modified_base 1: mod_base = OTHER; note = 2'-O-methyladenosine-3'-phosphorothioate
  modified_base 2: mod_base = OTHER; note = 2'-deoxyadenosine-3'-phosphorothioate
  modified_base 3: mod_base = OTHER; note = 2'-O-methyladenosine-3'-phosphate
  modified_base 4: mod_base = OTHER; note = 2'-O-methylguanosine-3'-phosphate
  modified_base 6: mod_base = OTHER; note = 2'-O-methyladenosine-3'-phosphate
  modified_base 8: mod_base = OTHER; note = 2'-O-methyladenosine-3'-phosphate
  modified_base 9: mod_base = OTHER; note = 2'-O-methyluridine-3'-phosphate
  modified_base 10: mod_base = OTHER; note = 2'-O-methylcytidine-3'-phosphate
  modified_base 11: mod_base = OTHER; note = 2'-O-methyladenosine-3'-phosphate
  modified_base 13: mod_base = OTHER; note = 2'-O-methylcytidine-3'-phosphate
  modified_base 14: mod_base = OTHER; note = 2'-fluorouridine-3'-phosphate
  modified_base 15: mod_base = OTHER; note = 2'-O-methylguanosine-3'-phosphate
  modified_base 16: mod_base = OTHER; note = 2'-O-methyladenosine-3'-phosphate
  modified_base 17: mod_base = OTHER; note = 2'-O-methyluridine-3'-phosphate
  modified_base 18: mod_base = OTHER; note = 2'-O-methylguanosine-3'-phosphate
  modified_base 19: mod_base = OTHER; note = 2'-O-methylguanosine-3'-phosphate
  modified_base 20: mod_base = OTHER; note = 2'-O-methyladenosine-3'-phosphate
  modified_base 21: mod_base = OTHER; note = 2'-O-methyluridine-3'-phosphorothioate
  modified_base 22: mod_base = OTHER; note = 2'-O-methyladenosine-3'-phosphorothioate
  modified_base 23: mod_base = OTHER; note = 2'-O-methylguanosine-3'-phosphate
  misc_feature 1: note = RNA
  misc_feature 2: note = DNA
  misc_feature 3..4: note = RNA
  misc_feature 5: note = DNA
  misc_feature 6: note = RNA
  misc_feature 7: note = DNA
  misc_feature 8..11: note = RNA
  misc_feature 12: note = DNA
  misc_feature 13..23: note = RNA
aaagtagatcatctgatggatag

SEQ ID NO: 7262 - DNA, 23 bp, synthetic construct
  source 1..23: mol_type = other DNA
  modified_base 1: mod_base = OTHER; note = 2'-O-methyladenosine-3'-phosphorothioate
  modified_base 2: mod_base = OTHER; note = 2'-deoxyadenosine-3'-phosphorothioate
  modified_base 3: mod_base = OTHER; note = 2'-O-methyladenosine-3'-phosphate
  modified_base 4: mod_base = OTHER; note = 2'-O-methyladenosine-3'-phosphate
  modified_base 6: mod_base = OTHER; note = 2'-O-methyluridine-3'-phosphate
  modified_base 8: mod_base = OTHER; note = 2'-O-methylguanosine-3'-phosphate
  modified_base 9: mod_base = OTHER; note = 2'-O-methyladenosine-3'-phosphate
  modified_base 10: mod_base = OTHER; note = 2'-O-methyluridine-3'-phosphate
  modified_base 11: mod_base = OTHER; note = 2'-O-methylcytidine-3'-phosphate
  modified_base 13: mod_base = OTHER; note = 2'-O-methyluridine-3'-phosphate
  modified_base 14: mod_base = OTHER; note = 2'-fluorocytidine-3'-phosphate
  modified_base 15: mod_base = OTHER; note = 2'-O-methyluridine-3'-phosphate
  modified_base 16: mod_base = OTHER; note = 2'-O-methylguanosine-3'-phosphate
  modified_base 17: mod_base = OTHER; note = 2'-O-methyladenosine-3'-phosphate
  modified_base 18: mod_base = OTHER; note = 2'-O-methyluridine-3'-phosphate
  modified_base 19: mod_base = OTHER; note = 2'-O-methylguanosine-3'-phosphate
  modified_base 20: mod_base = OTHER; note = 2'-O-methylguanosine-3'-phosphate
  modified_base 21: mod_base = OTHER; note = 2'-O-methyladenosine-3'-phosphorothioate
  modified_base 22: mod_base = OTHER; note = 2'-O-methyluridine-3'-phosphorothioate
  modified_base 23: mod_base = OTHER; note = 2'-O-methyladenosine-3'-phosphate
  misc_feature 1: note = RNA
  misc_feature 2: note = DNA
  misc_feature 3..4: note = RNA
  misc_feature 5: note = DNA
  misc_feature 6: note = RNA
  misc_feature 7: note = DNA
  misc_feature 8..11: note = RNA
  misc_feature 12: note = DNA
  misc_feature 13..23: note = RNA
aaaagtagatcatctgatggata

SEQ ID NO: 7263 - DNA, 23 bp, synthetic construct
  source 1..23: mol_type = other DNA
  modified_base 1: mod_base = OTHER; note = 2'-O-methyladenosine-3'-phosphorothioate
  modified_base 2: mod_base = OTHER; note = 2'-deoxyguanosine-3'-phosphorothioate
  modified_base 3: mod_base = OTHER; note = 2'-O-methyladenosine-3'-phosphate
  modified_base 4: mod_base = OTHER; note = 2'-O-methyladenosine-3'-phosphate
  modified_base 6: mod_base = OTHER; note = 2'-O-methylguanosine-3'-phosphate
  modified_base 8: mod_base = OTHER; note = 2'-O-methyladenosine-3'-phosphate
  modified_base 9: mod_base = OTHER; note = 2'-O-methylguanosine-3'-phosphate
  modified_base 10: mod_base = OTHER; note = 2'-O-methyladenosine-3'-phosphate
  modified_base 11: mod_base = OTHER; note = 2'-O-methyluridine-3'-phosphate
  modified_base 13: mod_base = OTHER; note = 2'-O-methyladenosine-3'-phosphate
  modified_base 14: mod_base = OTHER; note = 2'-fluorouridine-3'-phosphate
  modified_base 15: mod_base = OTHER; note = 2'-O-methylcytidine-3'-phosphate
  modified_base 16: mod_base = OTHER; note = 2'-O-methyluridine-3'-phosphate
  modified_base 17: mod_base = OTHER; note = 2'-O-methylguanosine-3'-phosphate
  modified_base 18: mod_base = OTHER; note = 2'-O-methyladenosine-3'-phosphate
  modified_base 19: mod_base = OTHER; note = 2'-O-methyluridine-3'-phosphate
  modified_base 20: mod_base = OTHER; note = 2'-O-methylguanosine-3'-phosphate
  modified_base 21: mod_base = OTHER; note = 2'-O-methylguanosine-3'-phosphorothioate
  modified_base 22: mod_base = OTHER; note = 2'-O-methyladenosine-3'-phosphorothioate
  modified_base 23: mod_base = OTHER; note = 2'-O-methyluridine-3'-phosphate
  misc_feature 1: note = RNA
  misc_feature 2: note = DNA
  misc_feature 3..4: note = RNA
  misc_feature 5: note = DNA
  misc_feature 6: note = RNA
  misc_feature 7: note = DNA
  misc_feature 8..11: note = RNA
  misc_feature 12: note = DNA
  misc_feature 13..23: note = RNA
agaaagtagatcatctgatggat

SEQ ID NO: 7264 - DNA, 23 bp, synthetic construct
  source 1..23: mol_type = other DNA
  modified_base 1: mod_base = OTHER; note = 2'-O-methyladenosine-3'-phosphorothioate
  modified_base 2: mod_base = OTHER; note = 2'-deoxythimidine-3'-phosphorothioate
  modified_base 3: mod_base = OTHER; note = 2'-O-methylguanosine-3'-phosphate
  modified_base 4: mod_base = OTHER; note = 2'-O-methyladenosine-3'-phosphate
  modified_base 6: mod_base = OTHER; note = 2'-O-methyladenosine-3'-phosphate
  modified_base 8: mod_base = OTHER; note = 2'-O-methyluridine-3'-phosphate
  modified_base 9: mod_base = OTHER; note = 2'-O-methyladenosine-3'-phosphate
  modified_base 10: mod_base = OTHER; note = 2'-O-methylguanosine-3'-phosphate
  modified_base 11: mod_base = OTHER; note = 2'-O-methyladenosine-3'-phosphate
  modified_base 13: mod_base = OTHER; note = 2'-O-methylcytidine-3'-phosphate
  modified_base 14: mod_base = OTHER; note = 2'-fluoroadenosine-3'-phosphate
  modified_base 15: mod_base = OTHER; note = 2'-O-methyluridine-3'-phosphate
  modified_base 16: mod_base = OTHER; note = 2'-O-methylcytidine-3'-phosphate
  modified_base 17: mod_base = OTHER; note = 2'-O-methyluridine-3'-phosphate
  modified_base 18: mod_base = OTHER; note = 2'-O-methylguanosine-3'-phosphate
  modified_base 19: mod_base = OTHER; note = 2'-O-methyladenosine-3'-phosphate
  modified_base 20: mod_base = OTHER; note = 2'-O-methyluridine-3'-phosphate
  modified_base 21: mod_base = OTHER; note = 2'-O-methylguanosine-3'-phosphorothioate
  modified_base 22: mod_base = OTHER; note = 2'-O-methylguanosine-3'-phosphorothioate
  modified_base 23: mod_base = OTHER; note = 2'-O-methyladenosine-3'-phosphate
  misc_feature 1: note = RNA
  misc_feature 2: note = DNA
  misc_feature 3..4: note = RNA
  misc_feature 5: note = DNA
  misc_feature 6: note = RNA
  misc_feature 7: note = DNA
  misc_feature 8..11: note = RNA
  misc_feature 12: note = DNA
  misc_feature 13..23: note = RNA
atgaaagtagatcatctgatgga

SEQ ID NO: 7265 - DNA, 23 bp, synthetic construct
  source 1..23: mol_type = other DNA
  modified_base 1: mod_base = OTHER; note = 2'-O-methyladenosine-3'-phosphorothioate
  modified_base 2: mod_base = OTHER; note = 2'-deoxycytidine-3'-phosphorothioate
  modified_base 3: mod_base = OTHER; note = 2'-O-methyluridine-3'-phosphate
  modified_base 4: mod_base = OTHER; note = 2'-O-methylguanosine-3'-phosphate
  modified_base 6: mod_base = OTHER; note = 2'-O-methyladenosine-3'-phosphate
  modified_base 8: mod_base = OTHER; note = 2'-O-methylguanosine-3'-phosphate
  modified_base 9: mod_base = OTHER; note = 2'-O-methyluridine-3'-phosphate
  modified_base 10: mod_base = OTHER; note = 2'-O-methyladenosine-3'-phosphate
  modified_base 11: mod_base = OTHER; note = 2'-O-methylguanosine-3'-phosphate
  modified_base 13: mod_base = OTHER; note = 2'-O-methyluridine-3'-phosphate
  modified_base 14: mod_base = OTHER; note = 2'-fluorocytidine-3'-phosphate
  modified_base 15: mod_base = OTHER; note = 2'-O-methyladenosine-3'-phosphate
  modified_base 16: mod_base = OTHER; note = 2'-O-methyluridine-3'-phosphate
  modified_base 17: mod_base = OTHER; note = 2'-O-methylcytidine-3'-phosphate
  modified_base 18: mod_base = OTHER; note = 2'-O-methyluridine-3'-phosphate
  modified_base 19: mod_base = OTHER; note = 2'-O-methylguanosine-3'-phosphate
  modified_base 20: mod_base = OTHER; note = 2'-O-methyladenosine-3'-phosphate
  modified_base 21: mod_base = OTHER; note = 2'-O-methyluridine-3'-phosphorothioate
  modified_base 22: mod_base = OTHER; note = 2'-O-methylguanosine-3'-phosphorothioate
  modified_base 23: mod_base = OTHER; note = 2'-O-methylguanosine-3'-phosphate
  misc_feature 1: note = RNA
  misc_feature 2: note = DNA
  misc_feature 3..4: note = RNA
  misc_feature 5: note = DNA
  misc_feature 6: note = RNA
  misc_feature 7: note = DNA
  misc_feature 8..11: note = RNA
  misc_feature 12: note = DNA
  misc_feature 13..23: note = RNA
actgaaagtagatcatctgatgg

SEQ ID NO: 7266 - DNA, 23 bp, synthetic construct
  source 1..23: mol_type = other DNA
  modified_base 1: mod_base = OTHER; note = 2'-O-methyladenosine-3'-phosphorothioate
  modified_base 2: mod_base = OTHER; note = 2'-deoxyguanosine-3'-phosphorothioate
  modified_base 3: mod_base = OTHER; note = 2'-O-methylcytidine-3'-phosphate
  modified_base 4: mod_base = OTHER; note = 2'-O-methyluridine-3'-phosphate
  modified_base 6: mod_base = OTHER; note = 2'-O-methyladenosine-3'-phosphate
  modified_base 8: mod_base = OTHER; note = 2'-O-methyladenosine-3'-phosphate
  modified_base 9: mod_base = OTHER; note = 2'-O-methylguanosine-3'-phosphate
  modified_base 10: mod_base = OTHER; note = 2'-O-methyluridine-3'-phosphate
  modified_base 11: mod_base = OTHER; note = 2'-O-methyladenosine-3'-phosphate
  modified_base 13: mod_base = OTHER; note = 2'-O-methyladenosine-3'-phosphate
  modified_base 14: mod_base = OTHER; note = 2'-fluorouridine-3'-phosphate
  modified_base 15: mod_base = OTHER; note = 2'-O-methylcytidine-3'-phosphate
  modified_base 16: mod_base = OTHER; note = 2'-O-methyladenosine-3'-phosphate
  modified_base 17: mod_base = OTHER; note = 2'-O-methyluridine-3'-phosphate
  modified_base 18: mod_base = OTHER; note = 2'-O-methylcytidine-3'-phosphate
  modified_base 19: mod_base = OTHER; note = 2'-O-methyluridine-3'-phosphate
  modified_base 20: mod_base = OTHER; note = 2'-O-methylguanosine-3'-phosphate
  modified_base 21: mod_base = OTHER; note = 2'-O-methyladenosine-3'-phosphorothioate
  modified_base 22: mod_base = OTHER; note = 2'-O-methyluridine-3'-phosphorothioate
  modified_base 23: mod_base = OTHER; note = 2'-O-methylguanosine-3'-phosphate
  misc_feature 1: note = RNA
  misc_feature 2: note = DNA
  misc_feature 3..4: note = RNA
  misc_feature 5: note = DNA
  misc_feature 6: note = RNA
  misc_feature 7: note = DNA
  misc_feature 8..11: note = RNA
  misc_feature 12: note = DNA
  misc_feature 13..23: note = RNA
agctgaaagtagatcatctgatg

SEQ ID NO: 7267 - DNA, 23 bp, synthetic construct
  source 1..23: mol_type = other DNA
  modified_base 1: mod_base = OTHER; note = 2'-O-methyladenosine-3'-phosphorothioate
  modified_base 2: mod_base = OTHER; note = 2'-deoxyguanosine-3'-phosphorothioate
  modified_base 3: mod_base = OTHER; note = 2'-O-methylguanosine-3'-phosphate
  modified_base 4: mod_base = OTHER; note = 2'-O-methylcytidine-3'-phosphate
  modified_base 6: mod_base = OTHER; note = 2'-O-methylguanosine-3'-phosphate
  modified_base 8: mod_base = OTHER; note = 2'-O-methyladenosine-3'-phosphate
  modified_base 9: mod_base = OTHER; note = 2'-O-methyladenosine-3'-phosphate
  modified_base 10: mod_base = OTHER; note = 2'-O-methylguanosine-3'-phosphate
  modified_base 11: mod_base = OTHER; note = 2'-O-methyluridine-3'-phosphate
  modified_base 13: mod_base = OTHER; note = 2'-O-methylguanosine-3'-phosphate
  modified_base 14: mod_base = OTHER; note = 2'-fluoroadenosine-3'-phosphate
  modified_base 15: mod_base = OTHER; note = 2'-O-methyluridine-3'-phosphate
  modified_base 16: mod_base = OTHER; note = 2'-O-methylcytidine-3'-phosphate
  modified_base 17: mod_base = OTHER; note = 2'-O-methyladenosine-3'-phosphate
  modified_base 18: mod_base = OTHER; note = 2'-O-methyluridine-3'-phosphate
  modified_base 19: mod_base = OTHER; note = 2'-O-methylcytidine-3'-phosphate
  modified_base 20: mod_base = OTHER; note = 2'-O-methyluridine-3'-phosphate
  modified_base 21: mod_base = OTHER; note = 2'-O-methylguanosine-3'-phosphorothioate
  modified_base 22: mod_base = OTHER; note = 2'-O-methyladenosine-3'-phosphorothioate
  modified_base 23: mod_base = OTHER; note = 2'-O-methyluridine-3'-phosphate
  misc_feature 1: note = RNA
  misc_feature 2: note = DNA
  misc_feature 3..4: note = RNA
  misc_feature 5: note = DNA
  misc_feature 6: note = RNA
  misc_feature 7: note = DNA
  misc_feature 8..11: note = RNA
  misc_feature 12: note = DNA
  misc_feature 13..23: note = RNA
aggctgaaagtagatcatctgat

SEQ ID NO: 7268 - DNA, 23 bp, synthetic construct
  source 1..23: mol_type = other DNA
  modified_base 1: mod_base = OTHER; note = 2'-O-methyladenosine-3'-phosphorothioate
  modified_base 2: mod_base = OTHER; note = 2'-deoxyadenosine-3'-phosphorothioate
  modified_base 3: mod_base = OTHER; note = 2'-O-methylguanosine-3'-phosphate
  modified_base 4: mod_base = OTHER; note = 2'-O-methylguanosine-3'-phosphate
  modified_base 6: mod_base = OTHER; note = 2'-O-methyluridine-3'-phosphate
  modified_base 8: mod_base = OTHER; note = 2'-O-methyladenosine-3'-phosphate
  modified_base 9: mod_base = OTHER; note = 2'-O-methyladenosine-3'-phosphate
  modified_base 10: mod_base = OTHER; note = 2'-O-methyladenosine-3'-phosphate
  modified_base 11: mod_base = OTHER; note = 2'-O-methylguanosine-3'-phosphate
  modified_base 13: mod_base = OTHER; note = 2'-O-methyladenosine-3'-phosphate
  modified_base 14: mod_base = OTHER; note = 2'-fluoroguanosine-3'-phosphate
  modified_base 15: mod_base = OTHER; note = 2'-O-methyladenosine-3'-phosphate
  modified_base 16: mod_base = OTHER; note = 2'-O-methyluridine-3'-phosphate
  modified_base 17: mod_base = OTHER; note = 2'-O-methylcytidine-3'-phosphate
  modified_base 18: mod_base = OTHER; note = 2'-O-methyladenosine-3'-phosphate
  modified_base 19: mod_base = OTHER; note = 2'-O-methyluridine-3'-phosphate
  modified_base 20: mod_base = OTHER; note = 2'-O-methylcytidine-3'-phosphate
  modified_base 21: mod_base = OTHER; note = 2'-O-methyluridine-3'-phosphorothioate
  modified_base 22: mod_base = OTHER; note = 2'-O-methylguanosine-3'-phosphorothioate
  modified_base 23: mod_base = OTHER; note = 2'-O-methyladenosine-3'-phosphate
  misc_feature 1: note = RNA
  misc_feature 2: note = DNA
  misc_feature 3..4: note = RNA
  misc_feature 5: note = DNA
  misc_feature 6: note = RNA
  misc_feature 7: note = DNA
  misc_feature 8..11: note = RNA
  misc_feature 12: note = DNA
  misc_feature 13..23: note = RNA
aaggctgaaagtagatcatctga

SEQ ID NO: 7269 - DNA, 23 bp, synthetic construct
  source 1..23: mol_type = other DNA
  modified_base 1: mod_base = OTHER; note = 2'-O-methyladenosine-3'-phosphorothioate
  modified_base 2: mod_base = OTHER; note = 2'-deoxyadenosine-3'-phosphorothioate
  modified_base 3: mod_base = OTHER; note = 2'-O-methyladenosine-3'-phosphate
  modified_base 4: mod_base = OTHER; note = 2'-O-methylguanosine-3'-phosphate
  modified_base 6: mod_base = OTHER; note = 2'-O-methylcytidine-3'-phosphate
  modified_base 8: mod_base = OTHER; note = 2'-O-methylguanosine-3'-phosphate
  modified_base 9: mod_base = OTHER; note = 2'-O-methyladenosine-3'-phosphate
  modified_base 10: mod_base = OTHER; note = 2'-O-methyladenosine-3'-phosphate
  modified_base 11: mod_base = OTHER; note = 2'-O-methyladenosine-3'-phosphate
  modified_base 13: mod_base = OTHER; note = 2'-O-methyluridine-3'-phosphate
  modified_base 14: mod_base = OTHER; note = 2'-fluoroadenosine-3'-phosphate
  modified_base 15: mod_base = OTHER; note = 2'-O-methylguanosine-3'-phosphate
  modified_base 16: mod_base = OTHER; note = 2'-O-methyladenosine-3'-phosphate
  modified_base 17: mod_base = OTHER; note = 2'-O-methyluridine-3'-phosphate
  modified_base 18: mod_base = OTHER; note = 2'-O-methylcytidine-3'-phosphate
  modified_base 19: mod_base = OTHER; note = 2'-O-methyladenosine-3'-phosphate
  modified_base 20: mod_base = OTHER; note = 2'-O-methyluridine-3'-phosphate
  modified_base 21: mod_base = OTHER; note = 2'-O-methylcytidine-3'-phosphorothioate
  modified_base 22: mod_base = OTHER; note = 2'-O-methyluridine-3'-phosphorothioate
  modified_base 23: mod_base = OTHER; note = 2'-O-methylguanosine-3'-phosphate
  misc_feature 1: note = RNA
  misc_feature 2: note = DNA
  misc_feature 3..4: note = RNA
  misc_feature 5: note = DNA
  misc_feature 6: note = RNA
  misc_feature 7: note = DNA
  misc_feature 8..11: note = RNA
  misc_feature 12: note = DNA
  misc_feature 13..23: note = RNA
aaaggctgaaagtagatcatctg

SEQ ID NO: 7270 - DNA, 23 bp, synthetic construct
  source 1..23: mol_type = other DNA
  modified_base 1: mod_base = OTHER; note = 2'-O-methyladenosine-3'-phosphorothioate
  modified_base 2: mod_base = OTHER; note = 2'-deoxyguanosine-3'-phosphorothioate
  modified_base 3: mod_base = OTHER; note = 2'-O-methyladenosine-3'-phosphate
  modified_base 4: mod_base = OTHER; note = 2'-O-methyladenosine-3'-phosphate
  modified_base 6: mod_base = OTHER; note = 2'-O-methylguanosine-3'-phosphate
  modified_base 8: mod_base = OTHER; note = 2'-O-methyluridine-3'-phosphate
  modified_base 9: mod_base = OTHER; note = 2'-O-methylguanosine-3'-phosphate
  modified_base 10: mod_base = OTHER; note = 2'-O-methyladenosine-3'-phosphate
  modified_base 11: mod_base = OTHER; note = 2'-O-methyladenosine-3'-phosphate
  modified_base 13: mod_base = OTHER; note = 2'-O-methylguanosine-3'-phosphate
  modified_base 14: mod_base = OTHER; note = 2'-fluorouridine-3'-phosphate
  modified_base 15: mod_base = OTHER; note = 2'-O-methyladenosine-3'-phosphate
  modified_base 16: mod_base = OTHER; note = 2'-O-methylguanosine-3'-phosphate
  modified_base 17: mod_base = OTHER; note = 2'-O-methyladenosine-3'-phosphate
  modified_base 18: mod_base = OTHER; note = 2'-O-methyluridine-3'-phosphate
  modified_base 19: mod_base = OTHER; note = 2'-O-methylcytidine-3'-phosphate
  modified_base 20: mod_base = OTHER; note = 2'-O-methyladenosine-3'-phosphate
  modified_base 21: mod_base = OTHER; note = 2'-O-methyluridine-3'-phosphorothioate
  modified_base 22: mod_base = OTHER; note = 2'-O-methylcytidine-3'-phosphorothioate
  modified_base 23: mod_base = OTHER; note = 2'-O-methyluridine-3'-phosphate
  misc_feature 1: note = RNA
  misc_feature 2: note = DNA
  misc_feature 3..4: note = RNA
  misc_feature 5: note = DNA
  misc_feature 6: note = RNA
  misc_feature 7: note = DNA
  misc_feature 8..11: note = RNA
  misc_feature 12: note = DNA
  misc_feature 13..23: note = RNA
agaaggctgaaagtagatcatct

SEQ ID NO: 7271 - DNA, 23 bp, synthetic construct
  source 1..23: mol_type = other DNA
  modified_base 1: mod_base = OTHER; note = 2'-O-methyladenosine-3'-phosphorothioate
  modified_base 2: mod_base = OTHER; note = 2'-deoxyguanosine-3'-phosphorothioate
  modified_base 3: mod_base = OTHER; note = 2'-O-methylguanosine-3'-phosphate
  modified_base 4: mod_base = OTHER; note = 2'-O-methyladenosine-3'-phosphate
  modified_base 6: mod_base = OTHER; note = 2'-O-methylguanosine-3'-phosphate
  modified_base 8: mod_base = OTHER; note = 2'-O-methylcytidine-3'-phosphate
  modified_base 9: mod_base = OTHER; note = 2'-O-methyluridine-3'-phosphate
  modified_base 10: mod_base = OTHER; note = 2'-O-methylguanosine-3'-phosphate
  modified_base 11: mod_base = OTHER; note = 2'-O-methyladenosine-3'-phosphate
  modified_base 13: mod_base = OTHER; note = 2'-O-methyladenosine-3'-phosphate
  modified_base 14: mod_base = OTHER; note = 2'-fluoroguanosine-3'-phosphate
  modified_base 15: mod_base = OTHER; note = 2'-O-methyluridine-3'-phosphate
  modified_base 16: mod_base = OTHER; note = 2'-O-methyladenosine-3'-phosphate
  modified_base 17: mod_base = OTHER; note = 2'-O-methylguanosine-3'-phosphate
  modified_base 18: mod_base = OTHER; note = 2'-O-methyladenosine-3'-phosphate
  modified_base 19: mod_base = OTHER; note = 2'-O-methyluridine-3'-phosphate
  modified_base 20: mod_base = OTHER; note = 2'-O-methylcytidine-3'-phosphate
  modified_base 21: mod_base = OTHER; note = 2'-O-methyladenosine-3'-phosphorothioate
  modified_base 22: mod_base = OTHER; note = 2'-O-methyluridine-3'-phosphorothioate
  modified_base 23: mod_base = OTHER; note = 2'-O-methylcytidine-3'-phosphate
  misc_feature 1: note = RNA
  misc_feature 2: note = DNA
  misc_feature 3..4: note = RNA
  misc_feature 5: note = DNA
  misc_feature 6: note = RNA
  misc_feature 7: note = DNA
  misc_feature 8..11: note = RNA
  misc_feature 12: note = DNA
  misc_feature 13..23: note = RNA
aggaaggctgaaagtagatcatc

SEQ ID NO: 7272 - DNA, 23 bp, synthetic construct
  source 1..23: mol_type = other DNA
  modified_base 1: mod_base = OTHER; note = 2'-O-methyladenosine-3'-phosphorothioate
  modified_base 2: mod_base = OTHER; note = 2'-deoxyadenosine-3'-phosphorothioate
  modified_base 3: mod_base = OTHER; note = 2'-O-methylguanosine-3'-phosphate
  modified_base 4: mod_base = OTHER; note = 2'-O-methylguanosine-3'-phosphate
  modified_base 6: mod_base = OTHER; note = 2'-O-methyladenosine-3'-phosphate
  modified_base 8: mod_base = OTHER; note = 2'-O-methylguanosine-3'-phosphate
  modified_base 9: mod_base = OTHER; note = 2'-O-methylcytidine-3'-phosphate
  modified_base 10: mod_base = OTHER; note = 2'-O-methyluridine-3'-phosphate
  modified_base 11: mod_base = OTHER; note = 2'-O-methylguanosine-3'-phosphate
  modified_base 13: mod_base = OTHER; note = 2'-O-methyladenosine-3'-phosphate
  modified_base 14: mod_base = OTHER; note = 2'-fluoroadenosine-3'-phosphate
  modified_base 15: mod_base = OTHER; note = 2'-O-methylguanosine-3'-phosphate
  modified_base 16: mod_base = OTHER; note = 2'-O-methyluridine-3'-phosphate
  modified_base 17: mod_base = OTHER; note = 2'-O-methyladenosine-3'-phosphate
  modified_base 18: mod_base = OTHER; note = 2'-O-methylguanosine-3'-phosphate
  modified_base 19: mod_base = OTHER; note = 2'-O-methyladenosine-3'-phosphate
  modified_base 20: mod_base = OTHER; note = 2'-O-methyluridine-3'-phosphate
  modified_base 21: mod_base = OTHER; note = 2'-O-methylcytidine-3'-phosphorothioate
  modified_base 22: mod_base = OTHER; note = 2'-O-methyladenosine-3'-phosphorothioate
  modified_base 23: mod_base = OTHER; note = 2'-O-methyluridine-3'-phosphate
  misc_feature 1: note = RNA
  misc_feature 2: note = DNA
  misc_feature 3..4: note = RNA
  misc_feature 5: note = DNA
  misc_feature 6: note = RNA
  misc_feature 7: note = DNA
  misc_feature 8..11: note = RNA
  misc_feature 12: note = DNA
  misc_feature 13..23: note = RNA
aaggaaggctgaaagtagatcat

SEQ ID NO: 7273 - DNA, 23 bp, synthetic construct
  source 1..23: mol_type = other DNA
  modified_base 1: mod_base = OTHER; note = 2'-O-methyladenosine-3'-phosphorothioate
  modified_base 2: mod_base = OTHER; note = 2'-deoxycytidine-3'-phosphorothioate
  modified_base 3: mod_base = OTHER; note = 2'-O-methyladenosine-3'-phosphate
  modified_base 4: mod_base = OTHER; note = 2'-O-methylguanosine-3'-phosphate
  modified_base 6: mod_base = OTHER; note = 2'-O-methyladenosine-3'-phosphate
  modified_base 8: mod_base = OTHER; note = 2'-O-methylguanosine-3'-phosphate
  modified_base 9: mod_base = OTHER; note = 2'-O-methylguanosine-3'-phosphate
  modified_base 10: mod_base = OTHER; note = 2'-O-methylcytidine-3'-phosphate
  modified_base 11: mod_base = OTHER; note = 2'-O-methyluridine-3'-phosphate
  modified_base 13: mod_base = OTHER; note = 2'-O-methyladenosine-3'-phosphate
  modified_base 14: mod_base = OTHER; note = 2'-fluoroadenosine-3'-phosphate
  modified_base 15: mod_base = OTHER; note = 2'-O-methyladenosine-3'-phosphate
  modified_base 16: mod_base = OTHER; note = 2'-O-methylguanosine-3'-phosphate
  modified_base 17: mod_base = OTHER; note = 2'-O-methyluridine-3'-phosphate
  modified_base 18: mod_base = OTHER; note = 2'-O-methyladenosine-3'-phosphate
  modified_base 19: mod_base = OTHER; note = 2'-O-methylguanosine-3'-phosphate
  modified_base 20: mod_base = OTHER; note = 2'-O-methyladenosine-3'-phosphate
  modified_base 21: mod_base = OTHER; note = 2'-O-methyluridine-3'-phosphorothioate
  modified_base 22: mod_base = OTHER; note = 2'-O-methylcytidine-3'-phosphorothioate
  modified_base 23: mod_base = OTHER; note = 2'-O-methyladenosine-3'-phosphate
  misc_feature 1: note = RNA
  misc_feature 2: note = DNA
  misc_feature 3..4: note = RNA
  misc_feature 5: note = DNA
  misc_feature 6: note = RNA
  misc_feature 7: note = DNA
  misc_feature 8..11: note = RNA
  misc_feature 12: note = DNA
  misc_feature 13..23: note = RNA
acaggaaggctgaaagtagatca

SEQ ID NO: 7274 - DNA, 23 bp, synthetic construct
  source 1..23: mol_type = other DNA
  modified_base 1: mod_base = OTHER; note = 2'-O-methyladenosine-3'-phosphorothioate
  modified_base 2: mod_base = OTHER; note = 2'-deoxythimidine-3'-phosphorothioate
  modified_base 3: mod_base = OTHER; note = 2'-O-methylcytidine-3'-phosphate
  modified_base 4: mod_base = OTHER; note = 2'-O-methyladenosine-3'-phosphate
  modified_base 6: mod_base = OTHER; note = 2'-O-methylguanosine-3'-phosphate
  modified_base 8: mod_base = OTHER; note = 2'-O-methyladenosine-3'-phosphate
  modified_base 9: mod_base = OTHER; note = 2'-O-methylguanosine-3'-phosphate
  modified_base 10: mod_base = OTHER; note = 2'-O-methylguanosine-3'-phosphate
  modified_base 11: mod_base = OTHER; note = 2'-O-methylcytidine-3'-phosphate
  modified_base 13: mod_base = OTHER; note = 2'-O-methylguanosine-3'-phosphate
  modified_base 14: mod_base = OTHER; note = 2'-fluoroadenosine-3'-phosphate
  modified_base 15: mod_base = OTHER; note = 2'-O-methyladenosine-3'-phosphate
  modified_base 16: mod_base = OTHER; note = 2'-O-methyladenosine-3'-phosphate
  modified_base 17: mod_base = OTHER; note = 2'-O-methylguanosine-3'-phosphate
  modified_base 18: mod_base = OTHER; note = 2'-O-methyluridine-3'-phosphate
  modified_base 19: mod_base = OTHER; note = 2'-O-methyladenosine-3'-phosphate
  modified_base 20: mod_base = OTHER; note = 2'-O-methylguanosine-3'-phosphate
  modified_base 21: mod_base = OTHER; note = 2'-O-methyladenosine-3'-phosphorothioate
  modified_base 22: mod_base = OTHER; note = 2'-O-methyluridine-3'-phosphorothioate
  modified_base 23: mod_base = OTHER; note = 2'-O-methylcytidine-3'-phosphate
  misc_feature 1: note = RNA
  misc_feature 2: note = DNA
  misc_feature 3..4: note = RNA
  misc_feature 5: note = DNA
  misc_feature 6: note = RNA
  misc_feature 7: note = DNA
  misc_feature 8..11: note = RNA
  misc_feature 12: note = DNA
  misc_feature 13..23: note = RNA
atcaggaaggctgaaagtagatc

SEQ ID NO: 7275 - DNA, 23 bp, synthetic construct
  source 1..23: mol_type = other DNA
  modified_base 1: mod_base = OTHER; note = 2'-O-methyladenosine-3'-phosphorothioate
  modified_base 2: mod_base = OTHER; note = 2'-deoxycytidine-3'-phosphorothioate
  modified_base 3: mod_base = OTHER; note = 2'-O-methyluridine-3'-phosphate
  modified_base 4: mod_base = OTHER; note = 2'-O-methylcytidine-3'-phosphate
  modified_base 6: mod_base = OTHER; note = 2'-O-methylguanosine-3'-phosphate
  modified_base 8: mod_base = OTHER; note = 2'-O-methyladenosine-3'-phosphate
  modified_base 9: mod_base = OTHER; note = 2'-O-methyladenosine-3'-phosphate
  modified_base 10: mod_base = OTHER; note = 2'-O-methylguanosine-3'-phosphate
  modified_base 11: mod_base = OTHER; note = 2'-O-methylguanosine-3'-phosphate
  modified_base 13: mod_base = OTHER; note = 2'-O-methyluridine-3'-phosphate
  modified_base 14: mod_base = OTHER; note = 2'-fluoroguanosine-3'-phosphate
  modified_base 15: mod_base = OTHER; note = 2'-O-methyladenosine-3'-phosphate
  modified_base 16: mod_base = OTHER; note = 2'-O-methyladenosine-3'-phosphate
  modified_base 17: mod_base = OTHER; note = 2'-O-methyladenosine-3'-phosphate
  modified_base 18: mod_base = OTHER; note = 2'-O-methylguanosine-3'-phosphate
  modified_base 19: mod_base = OTHER; note = 2'-O-methyluridine-3'-phosphate
  modified_base 20: mod_base = OTHER; note = 2'-O-methyladenosine-3'-phosphate
  modified_base 21: mod_base = OTHER; note = 2'-O-methylguanosine-3'-phosphorothioate
  modified_base 22: mod_base = OTHER; note = 2'-O-methyladenosine-3'-phosphorothioate
  modified_base 23: mod_base = OTHER; note = 2'-O-methyluridine-3'-phosphate
  misc_feature 1: note = RNA
  misc_feature 2: note = DNA
  misc_feature 3..4: note = RNA
  misc_feature 5: note = DNA
  misc_feature 6: note = RNA
  misc_feature 7: note = DNA
  misc_feature 8..11: note = RNA
  misc_feature 12: note = DNA
  misc_feature 13..23: note = RNA
actcaggaaggctgaaagtagat

SEQ ID NO: 7276 - DNA, 23 bp, synthetic construct
  source 1..23: mol_type = other DNA
  modified_base 1: mod_base = OTHER; note = 2'-O-methyladenosine-3'-phosphorothioate
  modified_base 2: mod_base = OTHER; note = 2'-deoxyadenosine-3'-phosphorothioate
  modified_base 3: mod_base = OTHER; note = 2'-O-methylcytidine-3'-phosphate
  modified_base 4: mod_base = OTHER; note = 2'-O-methyluridine-3'-phosphate
  modified_base 6: mod_base = OTHER; note = 2'-O-methyladenosine-3'-phosphate
  modified_base 8: mod_base = OTHER; note = 2'-O-methylguanosine-3'-phosphate
  modified_base 9: mod_base = OTHER; note = 2'-O-methyladenosine-3'-phosphate
  modified_base 10: mod_base = OTHER; note = 2'-O-methyladenosine-3'-phosphate
  modified_base 11: mod_base = OTHER; note = 2'-O-methylguanosine-3'-phosphate
  modified_base 13: mod_base = OTHER; note = 2'-O-methylcytidine-3'-phosphate
  modified_base 14: mod_base = OTHER; note = 2'-fluorouridine-3'-phosphate
  modified_base 15: mod_base = OTHER; note = 2'-O-methylguanosine-3'-phosphate
  modified_base 16: mod_base = OTHER; note = 2'-O-methyladenosine-3'-phosphate
  modified_base 17: mod_base = OTHER; note = 2'-O-methyladenosine-3'-phosphate
  modified_base 18: mod_base = OTHER; note = 2'-O-methyladenosine-3'-phosphate
  modified_base 19: mod_base = OTHER; note = 2'-O-methylguanosine-3'-phosphate
  modified_base 20: mod_base = OTHER; note = 2'-O-methyluridine-3'-phosphate
  modified_base 21: mod_base = OTHER; note = 2'-O-methyladenosine-3'-phosphorothioate
  modified_base 22: mod_base = OTHER; note = 2'-O-methylguanosine-3'-phosphorothioate
  modified_base 23: mod_base = OTHER; note = 2'-O-methyladenosine-3'-phosphate
  misc_feature 1: note = RNA
  misc_feature 2: note = DNA
  misc_feature 3..4: note = RNA
  misc_feature 5: note = DNA
  misc_feature 6: note = RNA
  misc_feature 7: note = DNA
  misc_feature 8..11: note = RNA
  misc_feature 12: note = DNA
  misc_feature 13..23: note = RNA
aactcaggaaggctgaaagtaga

SEQ ID NO: 7277 - DNA, 23 bp, synthetic construct
  source 1..23: mol_type = other DNA
  modified_base 1: mod_base = OTHER; note = 2'-O-methyladenosine-3'-phosphorothioate
  modified_base 2: mod_base = OTHER; note = 2'-deoxyguanosine-3'-phosphorothioate
  modified_base 3: mod_base = OTHER; note = 2'-O-methyladenosine-3'-phosphate
  modified_base 4: mod_base = OTHER; note = 2'-O-methylcytidine-3'-phosphate
  modified_base 6: mod_base = OTHER; note = 2'-O-methylcytidine-3'-phosphate
  modified_base 8: mod_base = OTHER; note = 2'-O-methylguanosine-3'-phosphate
  modified_base 9: mod_base = OTHER; note = 2'-O-methylguanosine-3'-phosphate
  modified_base 10: mod_base = OTHER; note = 2'-O-methyladenosine-3'-phosphate
  modified_base 11: mod_base = OTHER; note = 2'-O-methyladenosine-3'-phosphate
  modified_base 13: mod_base = OTHER; note = 2'-O-methylguanosine-3'-phosphate
  modified_base 14: mod_base = OTHER; note = 2'-fluorocytidine-3'-phosphate
  modified_base 15: mod_base = OTHER; note = 2'-O-methyluridine-3'-phosphate
  modified_base 16: mod_base = OTHER; note = 2'-O-methylguanosine-3'-phosphate
  modified_base 17: mod_base = OTHER; note = 2'-O-methyladenosine-3'-phosphate
  modified_base 18: mod_base = OTHER; note = 2'-O-methyladenosine-3'-phosphate
  modified_base 19: mod_base = OTHER; note = 2'-O-methyladenosine-3'-phosphate
  modified_base 20: mod_base = OTHER; note = 2'-O-methylguanosine-3'-phosphate
  modified_base 21: mod_base = OTHER; note = 2'-O-methyluridine-3'-phosphorothioate
  modified_base 22: mod_base = OTHER; note = 2'-O-methyladenosine-3'-phosphorothioate
  modified_base 23: mod_base = OTHER; note = 2'-O-methylguanosine-3'-phosphate
  misc_feature 1: note = RNA
  misc_feature 2: note = DNA
  misc_feature 3..4: note = RNA
  misc_feature 5: note = DNA
  misc_feature 6: note = RNA
  misc_feature 7: note = DNA
  misc_feature 8..11: note = RNA
  misc_feature 12: note = DNA
  misc_feature 13..23: note = RNA
agactcaggaaggctgaaagtag

SEQ ID NO: 7278 - DNA, 23 bp, synthetic construct
  source 1..23: mol_type = other DNA
  modified_base 1: mod_base = OTHER; note = 2'-O-methyladenosine-3'-phosphorothioate
  modified_base 2: mod_base = OTHER; note = 2'-deoxycytidine-3'-phosphorothioate
  modified_base 3: mod_base = OTHER; note = 2'-O-methyluridine-3'-phosphate
  modified_base 4: mod_base = OTHER; note = 2'-O-methylguanosine-3'-phosphate
  modified_base 6: mod_base = OTHER; note = 2'-O-methylguanosine-3'-phosphate
  modified_base 8: mod_base = OTHER; note = 2'-O-methylcytidine-3'-phosphate
  modified_base 9: mod_base = OTHER; note = 2'-O-methyluridine-3'-phosphate
  modified_base 10: mod_base = OTHER; note = 2'-O-methylcytidine-3'-phosphate
  modified_base 11: mod_base = OTHER; note = 2'-O-methyladenosine-3'-phosphate
  modified_base 13: mod_base = OTHER; note = 2'-O-methylguanosine-3'-phosphate
  modified_base 14: mod_base = OTHER; note = 2'-fluoroadenosine-3'-phosphate
  modified_base 15: mod_base = OTHER; note = 2'-O-methyladenosine-3'-phosphate
  modified_base 16: mod_base = OTHER; note = 2'-O-methylguanosine-3'-phosphate
  modified_base 17: mod_base = OTHER; note = 2'-O-methylguanosine-3'-phosphate
  modified_base 18: mod_base = OTHER; note = 2'-O-methylcytidine-3'-phosphate
  modified_base 19: mod_base = OTHER; note = 2'-O-methyluridine-3'-phosphate
  modified_base 20: mod_base = OTHER; note = 2'-O-methylguanosine-3'-phosphate
  modified_base 21: mod_base = OTHER; note = 2'-O-methyladenosine-3'-phosphorothioate
  modified_base 22: mod_base = OTHER; note = 2'-O-methyladenosine-3'-phosphorothioate
  modified_base 23: mod_base = OTHER; note = 2'-O-methyladenosine-3'-phosphate
  misc_feature 1: note = RNA
  misc_feature 2: note = DNA
  misc_feature 3..4: note = RNA
  misc_feature 5: note = DNA
  misc_feature 6: note = RNA
  misc_feature 7: note = DNA
  misc_feature 8..11: note = RNA
  misc_feature 12: note = DNA
  misc_feature 13..23: note = RNA
actgggactcaggaaggctgaaa

SEQ ID NO: 7279 - DNA, 23 bp, synthetic construct
  source 1..23: mol_type = other DNA
  modified_base 1: mod_base = OTHER; note = 2'-O-methyladenosine-3'-phosphorothioate
  modified_base 2: mod_base = OTHER; note = 2'-deoxyguanosine-3'-phosphorothioate
  modified_base 3: mod_base = OTHER; note = 2'-O-methylcytidine-3'-phosphate
  modified_base 4: mod_base = OTHER; note = 2'-O-methylcytidine-3'-phosphate
  modified_base 6: mod_base = OTHER; note = 2'-O-methylcytidine-3'-phosphate
  modified_base 8: mod_base = OTHER; note = 2'-O-methyluridine-3'-phosphate
  modified_base 9: mod_base = OTHER; note = 2'-O-methylguanosine-3'-phosphate
  modified_base 10: mod_base = OTHER; note = 2'-O-methyluridine-3'-phosphate
  modified_base 11: mod_base = OTHER; note = 2'-O-methylcytidine-3'-phosphate
  modified_base 13: mod_base = OTHER; note = 2'-O-methyluridine-3'-phosphate
  modified_base 14: mod_base = OTHER; note = 2'-fluorocytidine-3'-phosphate
  modified_base 15: mod_base = OTHER; note = 2'-O-methyluridine-3'-phosphate
  modified_base 16: mod_base = OTHER; note = 2'-O-methyladenosine-3'-phosphate
  modified_base 17: mod_base = OTHER; note = 2'-O-methyluridine-3'-phosphate
  modified_base 18: mod_base = OTHER; note = 2'-O-methyluridine-3'-phosphate
  modified_base 19: mod_base = OTHER; note = 2'-O-methylguanosine-3'-phosphate
  modified_base 20: mod_base = OTHER; note = 2'-O-methyluridine-3'-phosphate
  modified_base 21: mod_base = OTHER; note = 2'-O-methylcytidine-3'-phosphorothioate
  modified_base 22: mod_base = OTHER; note = 2'-O-methyluridine-3'-phosphorothioate
  modified_base 23: mod_base = OTHER; note = 2'-O-methylguanosine-3'-phosphate
  misc_feature 1: note = RNA
  misc_feature 2: note = DNA
  misc_feature 3..4: note = RNA
  misc_feature 5: note = DNA
  misc_feature 6: note = RNA
  misc_feature 7: note = DNA
  misc_feature 8..11: note = RNA
  misc_feature 12: note = DNA
  misc_feature 13..23: note = RNA
agccacctgtcttctattgtctg

SEQ ID NO: 7280 - DNA, 23 bp, synthetic construct
  source 1..23: mol_type = other DNA
  modified_base 1: mod_base = OTHER; note = 2'-O-methyladenosine-3'-phosphorothioate
  modified_base 2: mod_base = OTHER; note = 2'-deoxyadenosine-3'-phosphorothioate
  modified_base 3: mod_base = OTHER; note = 2'-O-methylguanosine-3'-phosphate
  modified_base 4: mod_base = OTHER; note = 2'-O-methylcytidine-3'-phosphate
  modified_base 6: mod_base = OTHER; note = 2'-O-methyladenosine-3'-phosphate
  modified_base 8: mod_base = OTHER; note = 2'-O-methylcytidine-3'-phosphate
  modified_base 9: mod_base = OTHER; note = 2'-O-methyluridine-3'-phosphate
  modified_base 10: mod_base = OTHER; note = 2'-O-methylguanosine-3'-phosphate
  modified_base 11: mod_base = OTHER; note = 2'-O-methyluridine-3'-phosphate
  modified_base 13: mod_base = OTHER; note = 2'-O-methyluridine-3'-phosphate
  modified_base 14: mod_base = OTHER; note = 2'-fluorouridine-3'-phosphate
  modified_base 15: mod_base = OTHER; note = 2'-O-methylcytidine-3'-phosphate
  modified_base 16: mod_base = OTHER; note = 2'-O-methyluridine-3'-phosphate
  modified_base 17: mod_base = OTHER; note = 2'-O-methyladenosine-3'-phosphate
  modified_base 18: mod_base = OTHER; note = 2'-O-methyluridine-3'-phosphate
  modified_base 19: mod_base = OTHER; note = 2'-O-methyluridine-3'-phosphate
  modified_base 20: mod_base = OTHER; note = 2'-O-methylguanosine-3'-phosphate
  modified_base 21: mod_base = OTHER; note = 2'-O-methyluridine-3'-phosphorothioate
  modified_base 22: mod_base = OTHER; note = 2'-O-methylcytidine-3'-phosphorothioate
  modified_base 23: mod_base = OTHER; note = 2'-O-methyluridine-3'-phosphate
  misc_feature 1: note = RNA
  misc_feature 2: note = DNA
  misc_feature 3..4: note = RNA
  misc_feature 5: note = DNA
  misc_feature 6: note = RNA
  misc_feature 7: note = DNA
  misc_feature 8..11: note = RNA
  misc_feature 12: note = DNA
  misc_feature 13..23: note = RNA
aagccacctgtcttctattgtct

SEQ ID NO: 7281 - DNA, 23 bp, synthetic construct
  source 1..23: mol_type = other DNA
  modified_base 1: mod_base = OTHER; note = 2'-O-methyladenosine-3'-phosphorothioate
  modified_base 2: mod_base = OTHER; note = 2'-deoxyadenosine-3'-phosphorothioate
  modified_base 3: mod_base = OTHER; note = 2'-O-methylcytidine-3'-phosphate
  modified_base 4: mod_base = OTHER; note = 2'-O-methyladenosine-3'-phosphate
  modified_base 6: mod_base = OTHER; note = 2'-O-methylcytidine-3'-phosphate
  modified_base 8: mod_base = OTHER; note = 2'-O-methylguanosine-3'-phosphate
  modified_base 9: mod_base = OTHER; note = 2'-O-methyladenosine-3'-phosphate
  modified_base 10: mod_base = OTHER; note = 2'-O-methylcytidine-3'-phosphate
  modified_base 11: mod_base = OTHER; note = 2'-O-methyladenosine-3'-phosphate
  modified_base 13: mod_base = OTHER; note = 2'-O-methylcytidine-3'-phosphate
  modified_base 14: mod_base = OTHER; note = 2'-fluoroadenosine-3'-phosphate
  modified_base 15: mod_base = OTHER; note = 2'-O-methylcytidine-3'-phosphate
  modified_base 16: mod_base = OTHER; note = 2'-O-methyluridine-3'-phosphate
  modified_base 17: mod_base = OTHER; note = 2'-O-methylguanosine-3'-phosphate
  modified_base 18: mod_base = OTHER; note = 2'-O-methylcytidine-3'-phosphate
  modified_base 19: mod_base = OTHER; note = 2'-O-methylcytidine-3'-phosphate
  modified_base 20: mod_base = OTHER; note = 2'-O-methyladenosine-3'-phosphate
  modified_base 21: mod_base = OTHER; note = 2'-O-methylcytidine-3'-phosphorothioate
  modified_base 22: mod_base = OTHER; note = 2'-O-methyladenosine-3'-phosphorothioate
  modified_base 23: mod_base = OTHER; note = 2'-O-methylcytidine-3'-phosphate
  misc_feature 1: note = RNA
  misc_feature 2: note = DNA
  misc_feature 3..4: note = RNA
  misc_feature 5: note = DNA
  misc_feature 6: note = RNA
  misc_feature 7: note = DNA
  misc_feature 8..11: note = RNA
  misc_feature 12: note = DNA
  misc_feature 13..23: note = RNA
aacagcagacaccactgccacac

SEQ ID NO: 7282 - DNA, 23 bp, synthetic construct
  source 1..23: mol_type = other DNA
  modified_base 1: mod_base = OTHER; note = 2'-O-methyladenosine-3'-phosphorothioate
  modified_base 2: mod_base = OTHER; note = 2'-deoxyguanosine-3'-phosphorothioate
  modified_base 3: mod_base = OTHER; note = 2'-O-methyladenosine-3'-phosphate
  modified_base 4: mod_base = OTHER; note = 2'-O-methylcytidine-3'-phosphate
  modified_base 6: mod_base = OTHER; note = 2'-O-methylguanosine-3'-phosphate
  modified_base 8: mod_base = OTHER; note = 2'-O-methyladenosine-3'-phosphate
  modified_base 9: mod_base = OTHER; note = 2'-O-methylguanosine-3'-phosphate
  modified_base 10: mod_base = OTHER; note = 2'-O-methyladenosine-3'-phosphate
  modified_base 11: mod_base = OTHER; note = 2'-O-methylcytidine-3'-phosphate
  modified_base 13: mod_base = OTHER; note = 2'-O-methylcytidine-3'-phosphate
  modified_base 14: mod_base = OTHER; note = 2'-fluorocytidine-3'-phosphate
  modified_base 15: mod_base = OTHER; note = 2'-O-methyladenosine-3'-phosphate
  modified_base 16: mod_base = OTHER; note = 2'-O-methylcytidine-3'-phosphate
  modified_base 17: mod_base = OTHER; note = 2'-O-methyluridine-3'-phosphate
  modified_base 18: mod_base = OTHER; note = 2'-O-methylguanosine-3'-phosphate
  modified_base 19: mod_base = OTHER; note = 2'-O-methylcytidine-3'-phosphate
  modified_base 20: mod_base = OTHER; note = 2'-O-methylcytidine-3'-phosphate
  modified_base 21: mod_base = OTHER; note = 2'-O-methyladenosine-3'-phosphorothioate
  modified_base 22: mod_base = OTHER; note = 2'-O-methylcytidine-3'-phosphorothioate
  modified_base 23: mod_base = OTHER; note = 2'-O-methyladenosine-3'-phosphate
  misc_feature 1: note = RNA
  misc_feature 2: note = DNA
  misc_feature 3..4: note = RNA
  misc_feature 5: note = DNA
  misc_feature 6: note = RNA
  misc_feature 7: note = DNA
  misc_feature 8..11: note = RNA
  misc_feature 12: note = DNA
  misc_feature 13..23: note = RNA
agacagcagacaccactgccaca

SEQ ID NO: 7283 - DNA, 23 bp, synthetic construct
  source 1..23: mol_type = other DNA
  modified_base 1: mod_base = OTHER; note = 2'-O-methyladenosine-3'-phosphorothioate
  modified_base 2: mod_base = OTHER; note = 2'-deoxythimidine-3'-phosphorothioate
  modified_base 3: mod_base = OTHER; note = 2'-O-methylguanosine-3'-phosphate
  modified_base 4: mod_base = OTHER; note = 2'-O-methyladenosine-3'-phosphate
  modified_base 6: mod_base = OTHER; note = 2'-O-methyladenosine-3'-phosphate
  modified_base 8: mod_base = OTHER; note = 2'-O-methylcytidine-3'-phosphate
  modified_base 9: mod_base = OTHER; note = 2'-O-methyladenosine-3'-phosphate
  modified_base 10: mod_base = OTHER; note = 2'-O-methylguanosine-3'-phosphate
  modified_base 11: mod_base = OTHER; note = 2'-O-methyladenosine-3'-phosphate
  modified_base 13: mod_base = OTHER; note = 2'-O-methyladenosine-3'-phosphate
  modified_base 14: mod_base = OTHER; note = 2'-fluorocytidine-3'-phosphate
  modified_base 15: mod_base = OTHER; note = 2'-O-methylcytidine-3'-phosphate
  modified_base 16: mod_base = OTHER; note = 2'-O-methyladenosine-3'-phosphate
  modified_base 17: mod_base = OTHER; note = 2'-O-methylcytidine-3'-phosphate
  modified_base 18: mod_base = OTHER; note = 2'-O-methyluridine-3'-phosphate
  modified_base 19: mod_base = OTHER; note = 2'-O-methylguanosine-3'-phosphate
  modified_base 20: mod_base = OTHER; note = 2'-O-methylcytidine-3'-phosphate
  modified_base 21: mod_base = OTHER; note = 2'-O-methylcytidine-3'-phosphorothioate
  modified_base 22: mod_base = OTHER; note = 2'-O-methyladenosine-3'-phosphorothioate
  modified_base 23: mod_base = OTHER; note = 2'-O-methylcytidine-3'-phosphate
  misc_feature 1: note = RNA
  misc_feature 2: note = DNA
  misc_feature 3..4: note = RNA
  misc_feature 5: note = DNA
  misc_feature 6: note = RNA
  misc_feature 7: note = DNA
  misc_feature 8..11: note = RNA
  misc_feature 12: note = DNA
  misc_feature 13..23: note = RNA
atgacagcagacaccactgccac

SEQ ID NO: 7284 - DNA, 23 bp, synthetic construct
  source 1..23: mol_type = other DNA
  modified_base 1: mod_base = OTHER; note = 2'-O-methyladenosine-3'-phosphorothioate
  modified_base 2: mod_base = OTHER; note = 2'-deoxyguanosine-3'-phosphorothioate
  modified_base 3: mod_base = OTHER; note = 2'-O-methyluridine-3'-phosphate
  modified_base 4: mod_base = OTHER; note = 2'-O-methylguanosine-3'-phosphate
  modified_base 6: mod_base = OTHER; note = 2'-O-methylcytidine-3'-phosphate
  modified_base 8: mod_base = OTHER; note = 2'-O-methylguanosine-3'-phosphate
  modified_base 9: mod_base = OTHER; note = 2'-O-methylcytidine-3'-phosphate
  modified_base 10: mod_base = OTHER; note = 2'-O-methyladenosine-3'-phosphate
  modified_base 11: mod_base = OTHER; note = 2'-O-methylguanosine-3'-phosphate
  modified_base 13: mod_base = OTHER; note = 2'-O-methylcytidine-3'-phosphate
  modified_base 14: mod_base = OTHER; note = 2'-fluoroadenosine-3'-phosphate
  modified_base 15: mod_base = OTHER; note = 2'-O-methylcytidine-3'-phosphate
  modified_base 16: mod_base = OTHER; note = 2'-O-methylcytidine-3'-phosphate
  modified_base 17: mod_base = OTHER; note = 2'-O-methyladenosine-3'-phosphate
  modified_base 18: mod_base = OTHER; note = 2'-O-methylcytidine-3'-phosphate
  modified_base 19: mod_base = OTHER; note = 2'-O-methyluridine-3'-phosphate
  modified_base 20: mod_base = OTHER; note = 2'-O-methylguanosine-3'-phosphate
  modified_base 21: mod_base = OTHER; note = 2'-O-methylcytidine-3'-phosphorothioate
  modified_base 22: mod_base = OTHER; note = 2'-O-methylcytidine-3'-phosphorothioate
  modified_base 23: mod_base = OTHER; note = 2'-O-methyladenosine-3'-phosphate
  misc_feature 1: note = RNA
  misc_feature 2: note = DNA
  misc_feature 3..4: note = RNA
  misc_feature 5: note = DNA
  misc_feature 6: note = RNA
  misc_feature 7: note = DNA
  misc_feature 8..11: note = RNA
  misc_feature 12: note = DNA
  misc_feature 13..23: note = RNA
agtgacagcagacaccactgcca

SEQ ID NO: 7285 - DNA, 23 bp, synthetic construct
  source 1..23: mol_type = other DNA
  modified_base 1: mod_base = OTHER; note = 2'-O-methyladenosine-3'-phosphorothioate
  modified_base 2: mod_base = OTHER; note = 2'-deoxyadenosine-3'-phosphorothioate
  modified_base 3: mod_base = OTHER; note = 2'-O-methylguanosine-3'-phosphate
  modified_base 4: mod_base = OTHER; note = 2'-O-methyluridine-3'-phosphate
  modified_base 6: mod_base = OTHER; note = 2'-O-methyladenosine-3'-phosphate
  modified_base 8: mod_base = OTHER; note = 2'-O-methyladenosine-3'-phosphate
  modified_base 9: mod_base = OTHER; note = 2'-O-methylguanosine-3'-phosphate
  modified_base 10: mod_base = OTHER; note = 2'-O-methylcytidine-3'-phosphate
  modified_base 11: mod_base = OTHER; note = 2'-O-methyladenosine-3'-phosphate
  modified_base 13: mod_base = OTHER; note = 2'-O-methyladenosine-3'-phosphate
  modified_base 14: mod_base = OTHER; note = 2'-fluorocytidine-3'-phosphate
  modified_base 15: mod_base = OTHER; note = 2'-O-methyladenosine-3'-phosphate
  modified_base 16: mod_base = OTHER; note = 2'-O-methylcytidine-3'-phosphate
  modified_base 17: mod_base = OTHER; note = 2'-O-methylcytidine-3'-phosphate
  modified_base 18: mod_base = OTHER; note = 2'-O-methyladenosine-3'-phosphate
  modified_base 19: mod_base = OTHER; note = 2'-O-methylcytidine-3'-phosphate
  modified_base 20: mod_base = OTHER; note = 2'-O-methyluridine-3'-phosphate
  modified_base 21: mod_base = OTHER; note = 2'-O-methylguanosine-3'-phosphorothioate
  modified_base 22: mod_base = OTHER; note = 2'-O-methylcytidine-3'-phosphorothioate
  modified_base 23: mod_base = OTHER; note = 2'-O-methylcytidine-3'-phosphate
  misc_feature 1: note = RNA
  misc_feature 2: note = DNA
  misc_feature 3..4: note = RNA
  misc_feature 5: note = DNA
  misc_feature 6: note = RNA
  misc_feature 7: note = DNA
  misc_feature 8..11: note = RNA
  misc_feature 12: note = DNA
  misc_feature 13..23: note = RNA
aagtgacagcagacaccactgcc

SEQ ID NO: 7286 - DNA, 23 bp, synthetic construct
  source 1..23: mol_type = other DNA
  modified_base 1: mod_base = OTHER; note = 2'-O-methyladenosine-3'-phosphorothioate
  modified_base 2: mod_base = OTHER; note = 2'-deoxycytidine-3'-phosphorothioate
  modified_base 3: mod_base = OTHER; note = 2'-O-methyladenosine-3'-phosphate
  modified_base 4: mod_base = OTHER; note = 2'-O-methylguanosine-3'-phosphate
  modified_base 6: mod_base = OTHER; note = 2'-O-methylguanosine-3'-phosphate
  modified_base 8: mod_base = OTHER; note = 2'-O-methylcytidine-3'-phosphate
  modified_base 9: mod_base = OTHER; note = 2'-O-methyladenosine-3'-phosphate
  modified_base 10: mod_base = OTHER; note = 2'-O-methylguanosine-3'-phosphate
  modified_base 11: mod_base = OTHER; note = 2'-O-methylcytidine-3'-phosphate
  modified_base 13: mod_base = OTHER; note = 2'-O-methylguanosine-3'-phosphate
  modified_base 14: mod_base = OTHER; note = 2'-fluoroadenosine-3'-phosphate
  modified_base 15: mod_base = OTHER; note = 2'-O-methylcytidine-3'-phosphate
  modified_base 16: mod_base = OTHER; note = 2'-O-methyladenosine-3'-phosphate
  modified_base 17: mod_base = OTHER; note = 2'-O-methylcytidine-3'-phosphate
  modified_base 18: mod_base = OTHER; note = 2'-O-methylcytidine-3'-phosphate
  modified_base 19: mod_base = OTHER; note = 2'-O-methyladenosine-3'-phosphate
  modified_base 20: mod_base = OTHER; note = 2'-O-methylcytidine-3'-phosphate
  modified_base 21: mod_base = OTHER; note = 2'-O-methyluridine-3'-phosphorothioate
  modified_base 22: mod_base = OTHER; note = 2'-O-methylguanosine-3'-phosphorothioate
  modified_base 23: mod_base = OTHER; note = 2'-O-methylcytidine-3'-phosphate
  misc_feature 1: note = RNA
  misc_feature 2: note = DNA
  misc_feature 3..4: note = RNA
  misc_feature 5: note = DNA
  misc_feature 6: note = RNA
  misc_feature 7: note = DNA
  misc_feature 8..11: note = RNA
  misc_feature 12: note = DNA
  misc_feature 13..23: note = RNA
acagtgacagcagacaccactgc

SEQ ID NO: 7287 - DNA, 23 bp, synthetic construct
  source 1..23: mol_type = other DNA
  modified_base 1: mod_base = OTHER; note = 2'-O-methyladenosine-3'-phosphorothioate
  modified_base 2: mod_base = OTHER; note = 2'-deoxyadenosine-3'-phosphorothioate
  modified_base 3: mod_base = OTHER; note = 2'-O-methylcytidine-3'-phosphate
  modified_base 4: mod_base = OTHER; note = 2'-O-methyladenosine-3'-phosphate
  modified_base 6: mod_base = OTHER; note = 2'-O-methyluridine-3'-phosphate
  modified_base 8: mod_base = OTHER; note = 2'-O-methyladenosine-3'-phosphate
  modified_base 9: mod_base = OTHER; note = 2'-O-methylcytidine-3'-phosphate
  modified_base 10: mod_base = OTHER; note = 2'-O-methyladenosine-3'-phosphate
  modified_base 11: mod_base = OTHER; note = 2'-O-methylguanosine-3'-phosphate
  modified_base 13: mod_base = OTHER; note = 2'-O-methyladenosine-3'-phosphate
  modified_base 14: mod_base = OTHER; note = 2'-fluoroguanosine-3'-phosphate
  modified_base 15: mod_base = OTHER; note = 2'-O-methyladenosine-3'-phosphate
  modified_base 16: mod_base = OTHER; note = 2'-O-methylcytidine-3'-phosphate
  modified_base 17: mod_base = OTHER; note = 2'-O-methyladenosine-3'-phosphate
  modified_base 18: mod_base = OTHER; note = 2'-O-methylcytidine-3'-phosphate
  modified_base 19: mod_base = OTHER; note = 2'-O-methylcytidine-3'-phosphate
  modified_base 20: mod_base = OTHER; note = 2'-O-methyladenosine-3'-phosphate
  modified_base 21: mod_base = OTHER; note = 2'-O-methylcytidine-3'-phosphorothioate
  modified_base 22: mod_base = OTHER; note = 2'-O-methyluridine-3'-phosphorothioate
  modified_base 23: mod_base = OTHER; note = 2'-O-methylguanosine-3'-phosphate
  misc_feature 1: note = RNA
  misc_feature 2: note = DNA
  misc_feature 3..4: note = RNA
  misc_feature 5: note = DNA
  misc_feature 6: note = RNA
  misc_feature 7: note = DNA
  misc_feature 8..11: note = RNA
  misc_feature 12: note = DNA
  misc_feature 13..23: note = RNA
aacagtgacagcagacaccactg

SEQ ID NO: 7288 - DNA, 23 bp, synthetic construct
  source 1..23: mol_type = other DNA
  modified_base 1: mod_base = OTHER; note = 2'-O-methyladenosine-3'-phosphorothioate
  modified_base 2: mod_base = OTHER; note = 2'-deoxycytidine-3'-phosphorothioate
  modified_base 3: mod_base = OTHER; note = 2'-O-methyladenosine-3'-phosphate
  modified_base 4: mod_base = OTHER; note = 2'-O-methylcytidine-3'-phosphate
  modified_base 6: mod_base = OTHER; note = 2'-O-methylguanosine-3'-phosphate
  modified_base 8: mod_base = OTHER; note = 2'-O-methylguanosine-3'-phosphate
  modified_base 9: mod_base = OTHER; note = 2'-O-methyladenosine-3'-phosphate
  modified_base 10: mod_base = OTHER; note = 2'-O-methylcytidine-3'-phosphate
  modified_base 11: mod_base = OTHER; note = 2'-O-methyladenosine-3'-phosphate
  modified_base 13: mod_base = OTHER; note = 2'-O-methylcytidine-3'-phosphate
  modified_base 14: mod_base = OTHER; note = 2'-fluoroadenosine-3'-phosphate
  modified_base 15: mod_base = OTHER; note = 2'-O-methylguanosine-3'-phosphate
  modified_base 16: mod_base = OTHER; note = 2'-O-methyladenosine-3'-phosphate
  modified_base 17: mod_base = OTHER; note = 2'-O-methylcytidine-3'-phosphate
  modified_base 18: mod_base = OTHER; note = 2'-O-methyladenosine-3'-phosphate
  modified_base 19: mod_base = OTHER; note = 2'-O-methylcytidine-3'-phosphate
  modified_base 20: mod_base = OTHER; note = 2'-O-methylcytidine-3'-phosphate
  modified_base 21: mod_base = OTHER; note = 2'-O-methyladenosine-3'-phosphorothioate
  modified_base 22: mod_base = OTHER; note = 2'-O-methylcytidine-3'-phosphorothioate
  modified_base 23: mod_base = OTHER; note = 2'-O-methyluridine-3'-phosphate
  misc_feature 1: note = RNA
  misc_feature 2: note = DNA
  misc_feature 3..4: note = RNA
  misc_feature 5: note = DNA
  misc_feature 6: note = RNA
  misc_feature 7: note = DNA
  misc_feature 8..11: note = RNA
  misc_feature 12: note = DNA
  misc_feature 13..23: note = RNA
acacagtgacagcagacaccact

SEQ ID NO: 7289 - DNA, 23 bp, synthetic construct
  source 1..23: mol_type = other DNA
  modified_base 1: mod_base = OTHER; note = 2'-O-methyladenosine-3'-phosphorothioate
  modified_base 2: mod_base = OTHER; note = 2'-deoxyguanosine-3'-phosphorothioate
  modified_base 3: mod_base = OTHER; note = 2'-O-methylcytidine-3'-phosphate
  modified_base 4: mod_base = OTHER; note = 2'-O-methyladenosine-3'-phosphate
  modified_base 6: mod_base = OTHER; note = 2'-O-methyladenosine-3'-phosphate
  modified_base 8: mod_base = OTHER; note = 2'-O-methyluridine-3'-phosphate
  modified_base 9: mod_base = OTHER; note = 2'-O-methylguanosine-3'-phosphate
  modified_base 10: mod_base = OTHER; note = 2'-O-methyladenosine-3'-phosphate
  modified_base 11: mod_base = OTHER; note = 2'-O-methylcytidine-3'-phosphate
  modified_base 13: mod_base = OTHER; note = 2'-O-methylguanosine-3'-phosphate
  modified_base 14: mod_base = OTHER; note = 2'-fluorocytidine-3'-phosphate
  modified_base 15: mod_base = OTHER; note = 2'-O-methyladenosine-3'-phosphate
  modified_base 16: mod_base = OTHER; note = 2'-O-methylguanosine-3'-phosphate
  modified_base 17: mod_base = OTHER; note = 2'-O-methyladenosine-3'-phosphate
  modified_base 18: mod_base = OTHER; note = 2'-O-methylcytidine-3'-phosphate
  modified_base 19: mod_base = OTHER; note = 2'-O-methyladenosine-3'-phosphate
  modified_base 20: mod_base = OTHER; note = 2'-O-methylcytidine-3'-phosphate
  modified_base 21: mod_base = OTHER; note = 2'-O-methylcytidine-3'-phosphorothioate
  modified_base 22: mod_base = OTHER; note = 2'-O-methyladenosine-3'-phosphorothioate
  modified_base 23: mod_base = OTHER; note = 2'-O-methylcytidine-3'-phosphate
  misc_feature 1: note = RNA
  misc_feature 2: note = DNA
  misc_feature 3..4: note = RNA
  misc_feature 5: note = DNA
  misc_feature 6: note = RNA
  misc_feature 7: note = DNA
  misc_feature 8..11: note = RNA
  misc_feature 12: note = DNA
  misc_feature 13..23: note = RNA
agcacagtgacagcagacaccac

SEQ ID NO: 7290 - DNA, 23 bp, synthetic construct
  source 1..23: mol_type = other DNA
  modified_base 1: mod_base = OTHER; note = 2'-O-methyladenosine-3'-phosphorothioate
  modified_base 2: mod_base = OTHER; note = 2'-deoxythimidine-3'-phosphorothioate
  modified_base 3: mod_base = OTHER; note = 2'-O-methylguanosine-3'-phosphate
  modified_base 4: mod_base = OTHER; note = 2'-O-methylcytidine-3'-phosphate
  modified_base 6: mod_base = OTHER; note = 2'-O-methylcytidine-3'-phosphate
  modified_base 8: mod_base = OTHER; note = 2'-O-methylguanosine-3'-phosphate
  modified_base 9: mod_base = OTHER; note = 2'-O-methyluridine-3'-phosphate
  modified_base 10: mod_base = OTHER; note = 2'-O-methylcytidine-3'-phosphate
  modified_base 11: mod_base = OTHER; note = 2'-O-methyluridine-3'-phosphate
  modified_base 13: mod_base = OTHER; note = 2'-O-methyluridine-3'-phosphate
  modified_base 14: mod_base = OTHER; note = 2'-fluorouridine-3'-phosphate
  modified_base 15: mod_base = OTHER; note = 2'-O-methylguanosine-3'-phosphate
  modified_base 16: mod_base = OTHER; note = 2'-O-methyladenosine-3'-phosphate
  modified_base 17: mod_base = OTHER; note = 2'-O-methylguanosine-3'-phosphate
  modified_base 18: mod_base = OTHER; note = 2'-O-methyluridine-3'-phosphate
  modified_base 19: mod_base = OTHER; note = 2'-O-methylcytidine-3'-phosphate
  modified_base 20: mod_base = OTHER; note = 2'-O-methyluridine-3'-phosphate
  modified_base 21: mod_base = OTHER; note = 2'-O-methylguanosine-3'-phosphorothioate
  modified_base 22: mod_base = OTHER; note = 2'-O-methyladenosine-3'-phosphorothioate
  modified_base 23: mod_base = OTHER; note = 2'-O-methyluridine-3'-phosphate
  misc_feature 1: note = RNA
  misc_feature 2: note = DNA
  misc_feature 3..4: note = RNA
  misc_feature 5: note = DNA
  misc_feature 6: note = RNA
  misc_feature 7: note = DNA
  misc_feature 8..11: note = RNA
  misc_feature 12: note = DNA
  misc_feature 13..23: note = RNA
atgctccgtctgttgagtctgat

SEQ ID NO: 7291 - DNA, 23 bp, synthetic construct
  source 1..23: mol_type = other DNA
  modified_base 1: mod_base = OTHER; note = 2'-O-methyladenosine-3'-phosphorothioate
  modified_base 2: mod_base = OTHER; note = 2'-deoxythimidine-3'-phosphorothioate
  modified_base 3: mod_base = OTHER; note = 2'-O-methyluridine-3'-phosphate
  modified_base 4: mod_base = OTHER; note = 2'-O-methylguanosine-3'-phosphate
  modified_base 6: mod_base = OTHER; note = 2'-O-methyluridine-3'-phosphate
  modified_base 8: mod_base = OTHER; note = 2'-O-methylcytidine-3'-phosphate
  modified_base 9: mod_base = OTHER; note = 2'-O-methylguanosine-3'-phosphate
  modified_base 10: mod_base = OTHER; note = 2'-O-methyluridine-3'-phosphate
  modified_base 11: mod_base = OTHER; note = 2'-O-methylcytidine-3'-phosphate
  modified_base 13: mod_base = OTHER; note = 2'-O-methylguanosine-3'-phosphate
  modified_base 14: mod_base = OTHER; note = 2'-fluorouridine-3'-phosphate
  modified_base 15: mod_base = OTHER; note = 2'-O-methyluridine-3'-phosphate
  modified_base 16: mod_base = OTHER; note = 2'-O-methylguanosine-3'-phosphate
  modified_base 17: mod_base = OTHER; note = 2'-O-methyladenosine-3'-phosphate
  modified_base 18: mod_base = OTHER; note = 2'-O-methylguanosine-3'-phosphate
  modified_base 19: mod_base = OTHER; note = 2'-O-methyluridine-3'-phosphate
  modified_base 20: mod_base = OTHER; note = 2'-O-methylcytidine-3'-phosphate
  modified_base 21: mod_base = OTHER; note = 2'-O-methyluridine-3'-phosphorothioate
  modified_base 22: mod_base = OTHER; note = 2'-O-methylguanosine-3'-phosphorothioate
  modified_base 23: mod_base = OTHER; note = 2'-O-methyladenosine-3'-phosphate
  misc_feature 1: note = RNA
  misc_feature 2: note = DNA
  misc_feature 3..4: note = RNA
  misc_feature 5: note = DNA
  misc_feature 6: note = RNA
  misc_feature 7: note = DNA
  misc_feature 8..11: note = RNA
  misc_feature 12: note = DNA
  misc_feature 13..23: note = RNA
attgctccgtctgttgagtctga

SEQ ID NO: 7292 - DNA, 23 bp, synthetic construct
  source 1..23: mol_type = other DNA
  modified_base 1: mod_base = OTHER; note = 2'-O-methyladenosine-3'-phosphorothioate
  modified_base 2: mod_base = OTHER; note = 2'-deoxyguanosine-3'-phosphorothioate
  modified_base 3: mod_base = OTHER; note = 2'-O-methyluridine-3'-phosphate
  modified_base 4: mod_base = OTHER; note = 2'-O-methyluridine-3'-phosphate
  modified_base 6: mod_base = OTHER; note = 2'-O-methylcytidine-3'-phosphate
  modified_base 8: mod_base = OTHER; note = 2'-O-methylcytidine-3'-phosphate
  modified_base 9: mod_base = OTHER; note = 2'-O-methylcytidine-3'-phosphate
  modified_base 10: mod_base = OTHER; note = 2'-O-methylguanosine-3'-phosphate
  modified_base 11: mod_base = OTHER; note = 2'-O-methyluridine-3'-phosphate
  modified_base 13: mod_base = OTHER; note = 2'-O-methyluridine-3'-phosphate
  modified_base 14: mod_base = OTHER; note = 2'-fluoroguanosine-3'-phosphate
  modified_base 15: mod_base = OTHER; note = 2'-O-methyluridine-3'-phosphate
  modified_base 16: mod_base = OTHER; note = 2'-O-methyluridine-3'-phosphate
  modified_base 17: mod_base = OTHER; note = 2'-O-methylguanosine-3'-phosphate
  modified_base 18: mod_base = OTHER; note = 2'-O-methyladenosine-3'-phosphate
  modified_base 19: mod_base = OTHER; note = 2'-O-methylguanosine-3'-phosphate
  modified_base 20: mod_base = OTHER; note = 2'-O-methyluridine-3'-phosphate
  modified_base 21: mod_base = OTHER; note = 2'-O-methylcytidine-3'-phosphorothioate
  modified_base 22: mod_base = OTHER; note = 2'-O-methyluridine-3'-phosphorothioate
  modified_base 23: mod_base = OTHER; note = 2'-O-methylguanosine-3'-phosphate
  misc_feature 1: note = RNA
  misc_feature 2: note = DNA
  misc_feature 3..4: note = RNA
  misc_feature 5: note = DNA
  misc_feature 6: note = RNA
  misc_feature 7: note = DNA
  misc_feature 8..11: note = RNA
  misc_feature 12: note = DNA
  misc_feature 13..23: note = RNA
agttgctccgtctgttgagtctg

SEQ ID NO: 7293 - DNA, 23 bp, synthetic construct
  source 1..23: mol_type = other DNA
  modified_base 1: mod_base = OTHER; note = 2'-O-methyladenosine-3'-phosphorothioate
  modified_base 2: mod_base = OTHER; note = 2'-deoxyadenosine-3'-phosphorothioate
  modified_base 3: mod_base = OTHER; note = 2'-O-methylguanosine-3'-phosphate
  modified_base 4: mod_base = OTHER; note = 2'-O-methyluridine-3'-phosphate
  modified_base 6: mod_base = OTHER; note = 2'-O-methylguanosine-3'-phosphate
  modified_base 8: mod_base = OTHER; note = 2'-O-methyluridine-3'-phosphate
  modified_base 9: mod_base = OTHER; note = 2'-O-methylcytidine-3'-phosphate
  modified_base 10: mod_base = OTHER; note = 2'-O-methylcytidine-3'-phosphate
  modified_base 11: mod_base = OTHER; note = 2'-O-methylguanosine-3'-phosphate
  modified_base 13: mod_base = OTHER; note = 2'-O-methylcytidine-3'-phosphate
  modified_base 14: mod_base = OTHER; note = 2'-fluorouridine-3'-phosphate
  modified_base 15: mod_base = OTHER; note = 2'-O-methylguanosine-3'-phosphate
  modified_base 16: mod_base = OTHER; note = 2'-O-methyluridine-3'-phosphate
  modified_base 17: mod_base = OTHER; note = 2'-O-methyluridine-3'-phosphate
  modified_base 18: mod_base = OTHER; note = 2'-O-methylguanosine-3'-phosphate
  modified_base 19: mod_base = OTHER; note = 2'-O-methyladenosine-3'-phosphate
  modified_base 20: mod_base = OTHER; note = 2'-O-methylguanosine-3'-phosphate
  modified_base 21: mod_base = OTHER; note = 2'-O-methyluridine-3'-phosphorothioate
  modified_base 22: mod_base = OTHER; note = 2'-O-methylcytidine-3'-phosphorothioate
  modified_base 23: mod_base = OTHER; note = 2'-O-methyluridine-3'-phosphate
  misc_feature 1: note = RNA
  misc_feature 2: note = DNA
  misc_feature 3..4: note = RNA
  misc_feature 5: note = DNA
  misc_feature 6: note = RNA
  misc_feature 7: note = DNA
  misc_feature 8..11: note = RNA
  misc_feature 12: note = DNA
  misc_feature 13..23: note = RNA
aagttgctccgtctgttgagtct

SEQ ID NO: 7294 - DNA, 23 bp, synthetic construct
  source 1..23: mol_type = other DNA
  modified_base 1: mod_base = OTHER; note = 2'-O-methyladenosine-3'-phosphorothioate
  modified_base 2: mod_base = OTHER; note = 2'-deoxycytidine-3'-phosphorothioate
  modified_base 3: mod_base = OTHER; note = 2'-O-methyladenosine-3'-phosphate
  modified_base 4: mod_base = OTHER; note = 2'-O-methylguanosine-3'-phosphate
  modified_base 6: mod_base = OTHER; note = 2'-O-methyluridine-3'-phosphate
  modified_base 8: mod_base = OTHER; note = 2'-O-methylcytidine-3'-phosphate
  modified_base 9: mod_base = OTHER; note = 2'-O-methyluridine-3'-phosphate
  modified_base 10: mod_base = OTHER; note = 2'-O-methylcytidine-3'-phosphate
  modified_base 11: mod_base = OTHER; note = 2'-O-methylcytidine-3'-phosphate
  modified_base 13: mod_base = OTHER; note = 2'-O-methyluridine-3'-phosphate
  modified_base 14: mod_base = OTHER; note = 2'-fluorocytidine-3'-phosphate
  modified_base 15: mod_base = OTHER; note = 2'-O-methyluridine-3'-phosphate
  modified_base 16: mod_base = OTHER; note = 2'-O-methylguanosine-3'-phosphate
  modified_base 17: mod_base = OTHER; note = 2'-O-methyluridine-3'-phosphate
  modified_base 18: mod_base = OTHER; note = 2'-O-methyluridine-3'-phosphate
  modified_base 19: mod_base = OTHER; note = 2'-O-methylguanosine-3'-phosphate
  modified_base 20: mod_base = OTHER; note = 2'-O-methyladenosine-3'-phosphate
  modified_base 21: mod_base = OTHER; note = 2'-O-methylguanosine-3'-phosphorothioate
  modified_base 22: mod_base = OTHER; note = 2'-O-methyluridine-3'-phosphorothioate
  modified_base 23: mod_base = OTHER; note = 2'-O-methylcytidine-3'-phosphate
  misc_feature 1: note = RNA
  misc_feature 2: note = DNA
  misc_feature 3..4: note = RNA
  misc_feature 5: note = DNA
  misc_feature 6: note = RNA
  misc_feature 7: note = DNA
  misc_feature 8..11: note = RNA
  misc_feature 12: note = DNA
  misc_feature 13..23: note = RNA
acagttgctccgtctgttgagtc

SEQ ID NO: 7295 - DNA, 23 bp, synthetic construct
  source 1..23: mol_type = other DNA
  modified_base 1: mod_base = OTHER; note = 2'-O-methyladenosine-3'-phosphorothioate
  modified_base 2: mod_base = OTHER; note = 2'-deoxyguanosine-3'-phosphorothioate
  modified_base 3: mod_base = OTHER; note = 2'-O-methylcytidine-3'-phosphate
  modified_base 4: mod_base = OTHER; note = 2'-O-methyladenosine-3'-phosphate
  modified_base 6: mod_base = OTHER; note = 2'-O-methyluridine-3'-phosphate
  modified_base 8: mod_base = OTHER; note = 2'-O-methylguanosine-3'-phosphate
  modified_base 9: mod_base = OTHER; note = 2'-O-methylcytidine-3'-phosphate
  modified_base 10: mod_base = OTHER; note = 2'-O-methyluridine-3'-phosphate
  modified_base 11: mod_base = OTHER; note = 2'-O-methylcytidine-3'-phosphate
  modified_base 13: mod_base = OTHER; note = 2'-O-methylguanosine-3'-phosphate
  modified_base 14: mod_base = OTHER; note = 2'-fluorouridine-3'-phosphate
  modified_base 15: mod_base = OTHER; note = 2'-O-methylcytidine-3'-phosphate
  modified_base 16: mod_base = OTHER; note = 2'-O-methyluridine-3'-phosphate
  modified_base 17: mod_base = OTHER; note = 2'-O-methylguanosine-3'-phosphate
  modified_base 18: mod_base = OTHER; note = 2'-O-methyluridine-3'-phosphate
  modified_base 19: mod_base = OTHER; note = 2'-O-methyluridine-3'-phosphate
  modified_base 20: mod_base = OTHER; note = 2'-O-methylguanosine-3'-phosphate
  modified_base 21: mod_base = OTHER; note = 2'-O-methyladenosine-3'-phosphorothioate
  modified_base 22: mod_base = OTHER; note = 2'-O-methylguanosine-3'-phosphorothioate
  modified_base 23: mod_base = OTHER; note = 2'-O-methyluridine-3'-phosphate
  misc_feature 1: note = RNA
  misc_feature 2: note = DNA
  misc_feature 3..4: note = RNA
  misc_feature 5: note = DNA
  misc_feature 6: note = RNA
  misc_feature 7: note = DNA
  misc_feature 8..11: note = RNA
  misc_feature 12: note = DNA
  misc_feature 13..23: note = RNA
agcagttgctccgtctgttgagt

SEQ ID NO: 7296 - DNA, 23 bp, synthetic construct
  source 1..23: mol_type = other DNA
  modified_base 1: mod_base = OTHER; note = 2'-O-methyladenosine-3'-phosphorothioate
  modified_base 2: mod_base = OTHER; note = 2'-deoxyguanosine-3'-phosphorothioate
  modified_base 3: mod_base = OTHER; note = 2'-O-methylguanosine-3'-phosphate
  modified_base 4: mod_base = OTHER; note = 2'-O-methylcytidine-3'-phosphate
  modified_base 6: mod_base = OTHER; note = 2'-O-methylguanosine-3'-phosphate
  modified_base 8: mod_base = OTHER; note = 2'-O-methyluridine-3'-phosphate
  modified_base 9: mod_base = OTHER; note = 2'-O-methylguanosine-3'-phosphate
  modified_base 10: mod_base = OTHER; note = 2'-O-methylcytidine-3'-phosphate
  modified_base 11: mod_base = OTHER; note = 2'-O-methyluridine-3'-phosphate
  modified_base 13: mod_base = OTHER; note = 2'-O-methylcytidine-3'-phosphate
  modified_base 14: mod_base = OTHER; note = 2'-fluoroguanosine-3'-phosphate
  modified_base 15: mod_base = OTHER; note = 2'-O-methyluridine-3'-phosphate
  modified_base 16: mod_base = OTHER; note = 2'-O-methylcytidine-3'-phosphate
  modified_base 17: mod_base = OTHER; note = 2'-O-methyluridine-3'-phosphate
  modified_base 18: mod_base = OTHER; note = 2'-O-methylguanosine-3'-phosphate
  modified_base 19: mod_base = OTHER; note = 2'-O-methyluridine-3'-phosphate
  modified_base 20: mod_base = OTHER; note = 2'-O-methyluridine-3'-phosphate
  modified_base 21: mod_base = OTHER; note = 2'-O-methylguanosine-3'-phosphorothioate
  modified_base 22: mod_base = OTHER; note = 2'-O-methyladenosine-3'-phosphorothioate
  modified_base 23: mod_base = OTHER; note = 2'-O-methylguanosine-3'-phosphate
  misc_feature 1: note = RNA
  misc_feature 2: note = DNA
  misc_feature 3..4: note = RNA
  misc_feature 5: note = DNA
  misc_feature 6: note = RNA
  misc_feature 7: note = DNA
  misc_feature 8..11: note = RNA
  misc_feature 12: note = DNA
  misc_feature 13..23: note = RNA
aggcagttgctccgtctgttgag

SEQ ID NO: 7297 - DNA, 23 bp, synthetic construct
  source 1..23: mol_type = other DNA
  modified_base 1: mod_base = OTHER; note = 2'-O-methyladenosine-3'-phosphorothioate
  modified_base 2: mod_base = OTHER; note = 2'-deoxythimidine-3'-phosphorothioate
  modified_base 3: mod_base = OTHER; note = 2'-O-methylguanosine-3'-phosphate
  modified_base 4: mod_base = OTHER; note = 2'-O-methylguanosine-3'-phosphate
  modified_base 6: mod_base = OTHER; note = 2'-O-methyladenosine-3'-phosphate
  modified_base 8: mod_base = OTHER; note = 2'-O-methyluridine-3'-phosphate
  modified_base 9: mod_base = OTHER; note = 2'-O-methyluridine-3'-phosphate
  modified_base 10: mod_base = OTHER; note = 2'-O-methylguanosine-3'-phosphate
  modified_base 11: mod_base = OTHER; note = 2'-O-methylcytidine-3'-phosphate
  modified_base 13: mod_base = OTHER; note = 2'-O-methylcytidine-3'-phosphate
  modified_base 14: mod_base = OTHER; note = 2'-fluorocytidine-3'-phosphate
  modified_base 15: mod_base = OTHER; note = 2'-O-methylguanosine-3'-phosphate
  modified_base 16: mod_base = OTHER; note = 2'-O-methyluridine-3'-phosphate
  modified_base 17: mod_base = OTHER; note = 2'-O-methylcytidine-3'-phosphate
  modified_base 18: mod_base = OTHER; note = 2'-O-methyluridine-3'-phosphate
  modified_base 19: mod_base = OTHER; note = 2'-O-methylguanosine-3'-phosphate
  modified_base 20: mod_base = OTHER; note = 2'-O-methyluridine-3'-phosphate
  modified_base 21: mod_base = OTHER; note = 2'-O-methyluridine-3'-phosphorothioate
  modified_base 22: mod_base = OTHER; note = 2'-O-methylguanosine-3'-phosphorothioate
  modified_base 23: mod_base = OTHER; note = 2'-O-methyladenosine-3'-phosphate
  misc_feature 1: note = RNA
  misc_feature 2: note = DNA
  misc_feature 3..4: note = RNA
  misc_feature 5: note = DNA
  misc_feature 6: note = RNA
  misc_feature 7: note = DNA
  misc_feature 8..11: note = RNA
  misc_feature 12: note = DNA
  misc_feature 13..23: note = RNA
atggcagttgctccgtctgttga

SEQ ID NO: 7298 - DNA, 23 bp, synthetic construct
  source 1..23: mol_type = other DNA
  modified_base 1: mod_base = OTHER; note = 2'-O-methyladenosine-3'-phosphorothioate
  modified_base 2: mod_base = OTHER; note = 2'-deoxyadenosine-3'-phosphorothioate
  modified_base 3: mod_base = OTHER; note = 2'-O-methyluridine-3'-phosphate
  modified_base 4: mod_base = OTHER; note = 2'-O-methylguanosine-3'-phosphate
  modified_base 6: mod_base = OTHER; note = 2'-O-methylcytidine-3'-phosphate
  modified_base 8: mod_base = OTHER; note = 2'-O-methylguanosine-3'-phosphate
  modified_base 9: mod_base = OTHER; note = 2'-O-methyluridine-3'-phosphate
  modified_base 10: mod_base = OTHER; note = 2'-O-methyluridine-3'-phosphate
  modified_base 11: mod_base = OTHER; note = 2'-O-methylguanosine-3'-phosphate
  modified_base 13: mod_base = OTHER; note = 2'-O-methyluridine-3'-phosphate
  modified_base 14: mod_base = OTHER; note = 2'-fluorocytidine-3'-phosphate
  modified_base 15: mod_base = OTHER; note = 2'-O-methylcytidine-3'-phosphate
  modified_base 16: mod_base = OTHER; note = 2'-O-methylguanosine-3'-phosphate
  modified_base 17: mod_base = OTHER; note = 2'-O-methyluridine-3'-phosphate
  modified_base 18: mod_base = OTHER; note = 2'-O-methylcytidine-3'-phosphate
  modified_base 19: mod_base = OTHER; note = 2'-O-methyluridine-3'-phosphate
  modified_base 20: mod_base = OTHER; note = 2'-O-methylguanosine-3'-phosphate
  modified_base 21: mod_base = OTHER; note = 2'-O-methyluridine-3'-phosphorothioate
  modified_base 22: mod_base = OTHER; note = 2'-O-methyluridine-3'-phosphorothioate
  modified_base 23: mod_base = OTHER; note = 2'-O-methylguanosine-3'-phosphate
  misc_feature 1: note = RNA
  misc_feature 2: note = DNA
  misc_feature 3..4: note = RNA
  misc_feature 5: note = DNA
  misc_feature 6: note = RNA
  misc_feature 7: note = DNA
  misc_feature 8..11: note = RNA
  misc_feature 12: note = DNA
  misc_feature 13..23: note = RNA
aatggcagttgctccgtctgttg

SEQ ID NO: 7299 - DNA, 23 bp, synthetic construct
  source 1..23: mol_type = other DNA
  modified_base 1: mod_base = OTHER; note = 2'-O-methyladenosine-3'-phosphorothioate
  modified_base 2: mod_base = OTHER; note = 2'-deoxyguanosine-3'-phosphorothioate
  modified_base 3: mod_base = OTHER; note = 2'-O-methyladenosine-3'-phosphate
  modified_base 4: mod_base = OTHER; note = 2'-O-methyluridine-3'-phosphate
  modified_base 6: mod_base = OTHER; note = 2'-O-methylguanosine-3'-phosphate
  modified_base 8: mod_base = OTHER; note = 2'-O-methyladenosine-3'-phosphate
  modified_base 9: mod_base = OTHER; note = 2'-O-methylguanosine-3'-phosphate
  modified_base 10: mod_base = OTHER; note = 2'-O-methyluridine-3'-phosphate
  modified_base 11: mod_base = OTHER; note = 2'-O-methyluridine-3'-phosphate
  modified_base 13: mod_base = OTHER; note = 2'-O-methylcytidine-3'-phosphate
  modified_base 14: mod_base = OTHER; note = 2'-fluorouridine-3'-phosphate
  modified_base 15: mod_base = OTHER; note = 2'-O-methylcytidine-3'-phosphate
  modified_base 16: mod_base = OTHER; note = 2'-O-methylcytidine-3'-phosphate
  modified_base 17: mod_base = OTHER; note = 2'-O-methylguanosine-3'-phosphate
  modified_base 18: mod_base = OTHER; note = 2'-O-methyluridine-3'-phosphate
  modified_base 19: mod_base = OTHER; note = 2'-O-methylcytidine-3'-phosphate
  modified_base 20: mod_base = OTHER; note = 2'-O-methyluridine-3'-phosphate
  modified_base 21: mod_base = OTHER; note = 2'-O-methylguanosine-3'-phosphorothioate
  modified_base 22: mod_base = OTHER; note = 2'-O-methyluridine-3'-phosphorothioate
  modified_base 23: mod_base = OTHER; note = 2'-O-methyluridine-3'-phosphate
  misc_feature 1: note = RNA
  misc_feature 2: note = DNA
  misc_feature 3..4: note = RNA
  misc_feature 5: note = DNA
  misc_feature 6: note = RNA
  misc_feature 7: note = DNA
  misc_feature 8..11: note = RNA
  misc_feature 12: note = DNA
  misc_feature 13..23: note = RNA
agatggcagttgctccgtctgtt

SEQ ID NO: 7300 - DNA, 23 bp, synthetic construct
  source 1..23: mol_type = other DNA
  modified_base 1: mod_base = OTHER; note = 2'-O-methyladenosine-3'-phosphorothioate
  modified_base 2: mod_base = OTHER; note = 2'-deoxyguanosine-3'-phosphorothioate
  modified_base 3: mod_base = OTHER; note = 2'-O-methylguanosine-3'-phosphate
  modified_base 4: mod_base = OTHER; note = 2'-O-methyladenosine-3'-phosphate
  modified_base 6: mod_base = OTHER; note = 2'-O-methylguanosine-3'-phosphate
  modified_base 8: mod_base = OTHER; note = 2'-O-methylcytidine-3'-phosphate
  modified_base 9: mod_base = OTHER; note = 2'-O-methyladenosine-3'-phosphate
  modified_base 10: mod_base = OTHER; note = 2'-O-methylguanosine-3'-phosphate
  modified_base 11: mod_base = OTHER; note = 2'-O-methyluridine-3'-phosphate
  modified_base 13: mod_base = OTHER; note = 2'-O-methylguanosine-3'-phosphate
  modified_base 14: mod_base = OTHER; note = 2'-fluorocytidine-3'-phosphate
  modified_base 15: mod_base = OTHER; note = 2'-O-methyluridine-3'-phosphate
  modified_base 16: mod_base = OTHER; note = 2'-O-methylcytidine-3'-phosphate
  modified_base 17: mod_base = OTHER; note = 2'-O-methylcytidine-3'-phosphate
  modified_base 18: mod_base = OTHER; note = 2'-O-methylguanosine-3'-phosphate
  modified_base 19: mod_base = OTHER; note = 2'-O-methyluridine-3'-phosphate
  modified_base 20: mod_base = OTHER; note = 2'-O-methylcytidine-3'-phosphate
  modified_base 21: mod_base = OTHER; note = 2'-O-methyluridine-3'-phosphorothioate
  modified_base 22: mod_base = OTHER; note = 2'-O-methylguanosine-3'-phosphorothioate
  modified_base 23: mod_base = OTHER; note = 2'-O-methyluridine-3'-phosphate
  misc_feature 1: note = RNA
  misc_feature 2: note = DNA
  misc_feature 3..4: note = RNA
  misc_feature 5: note = DNA
  misc_feature 6: note = RNA
  misc_feature 7: note = DNA
  misc_feature 8..11: note = RNA
  misc_feature 12: note = DNA
  misc_feature 13..23: note = RNA
aggatggcagttgctccgtctgt

SEQ ID NO: 7301 - DNA, 23 bp, synthetic construct
  source 1..23: mol_type = other DNA
  modified_base 1: mod_base = OTHER; note = 2'-O-methyladenosine-3'-phosphorothioate
  modified_base 2: mod_base = OTHER; note = 2'-deoxycytidine-3'-phosphorothioate
  modified_base 3: mod_base = OTHER; note = 2'-O-methylguanosine-3'-phosphate
  modified_base 4: mod_base = OTHER; note = 2'-O-methylguanosine-3'-phosphate
  modified_base 6: mod_base = OTHER; note = 2'-O-methyluridine-3'-phosphate
  modified_base 8: mod_base = OTHER; note = 2'-O-methylguanosine-3'-phosphate
  modified_base 9: mod_base = OTHER; note = 2'-O-methylcytidine-3'-phosphate
  modified_base 10: mod_base = OTHER; note = 2'-O-methyladenosine-3'-phosphate
  modified_base 11: mod_base = OTHER; note = 2'-O-methylguanosine-3'-phosphate
  modified_base 13: mod_base = OTHER; note = 2'-O-methyluridine-3'-phosphate
  modified_base 14: mod_base = OTHER; note = 2'-fluoroguanosine-3'-phosphate
  modified_base 15: mod_base = OTHER; note = 2'-O-methylcytidine-3'-phosphate
  modified_base 16: mod_base = OTHER; note = 2'-O-methyluridine-3'-phosphate
  modified_base 17: mod_base = OTHER; note = 2'-O-methylcytidine-3'-phosphate
  modified_base 18: mod_base = OTHER; note = 2'-O-methylcytidine-3'-phosphate
  modified_base 19: mod_base = OTHER; note = 2'-O-methylguanosine-3'-phosphate
  modified_base 20: mod_base = OTHER; note = 2'-O-methyluridine-3'-phosphate
  modified_base 21: mod_base = OTHER; note = 2'-O-methylcytidine-3'-phosphorothioate
  modified_base 22: mod_base = OTHER; note = 2'-O-methyluridine-3'-phosphorothioate
  modified_base 23: mod_base = OTHER; note = 2'-O-methylguanosine-3'-phosphate
  misc_feature 1: note = RNA
  misc_feature 2: note = DNA
  misc_feature 3..4: note = RNA
  misc_feature 5: note = DNA
  misc_feature 6: note = RNA
  misc_feature 7: note = DNA
  misc_feature 8..11: note = RNA
  misc_feature 12: note = DNA
  misc_feature 13..23: note = RNA
acggatggcagttgctccgtctg

SEQ ID NO: 7302 - DNA, 23 bp, synthetic construct
  source 1..23: mol_type = other DNA
  modified_base 1: mod_base = OTHER; note = 2'-O-methyladenosine-3'-phosphorothioate
  modified_base 2: mod_base = OTHER; note = 2'-deoxythimidine-3'-phosphorothioate
  modified_base 3: mod_base = OTHER; note = 2'-O-methylcytidine-3'-phosphate
  modified_base 4: mod_base = OTHER; note = 2'-O-methylguanosine-3'-phosphate
  modified_base 6: mod_base = OTHER; note = 2'-O-methyladenosine-3'-phosphate
  modified_base 8: mod_base = OTHER; note = 2'-O-methylguanosine-3'-phosphate
  modified_base 9: mod_base = OTHER; note = 2'-O-methylguanosine-3'-phosphate
  modified_base 10: mod_base = OTHER; note = 2'-O-methylcytidine-3'-phosphate
  modified_base 11: mod_base = OTHER; note = 2'-O-methyladenosine-3'-phosphate
  modified_base 13: mod_base = OTHER; note = 2'-O-methyluridine-3'-phosphate
  modified_base 14: mod_base = OTHER; note = 2'-fluorouridine-3'-phosphate
  modified_base 15: mod_base = OTHER; note = 2'-O-methylguanosine-3'-phosphate
  modified_base 16: mod_base = OTHER; note = 2'-O-methylcytidine-3'-phosphate
  modified_base 17: mod_base = OTHER; note = 2'-O-methyluridine-3'-phosphate
  modified_base 18: mod_base = OTHER; note = 2'-O-methylcytidine-3'-phosphate
  modified_base 19: mod_base = OTHER; note = 2'-O-methylcytidine-3'-phosphate
  modified_base 20: mod_base = OTHER; note = 2'-O-methylguanosine-3'-phosphate
  modified_base 21: mod_base = OTHER; note = 2'-O-methyluridine-3'-phosphorothioate
  modified_base 22: mod_base = OTHER; note = 2'-O-methylcytidine-3'-phosphorothioate
  modified_base 23: mod_base = OTHER; note = 2'-O-methyluridine-3'-phosphate
  misc_feature 1: note = RNA
  misc_feature 2: note = DNA
  misc_feature 3..4: note = RNA
  misc_feature 5: note = DNA
  misc_feature 6: note = RNA
  misc_feature 7: note = DNA
  misc_feature 8..11: note = RNA
  misc_feature 12: note = DNA
  misc_feature 13..23: note = RNA
atcggatggcagttgctccgtct

SEQ ID NO: 7303 - DNA, 23 bp, synthetic construct
  source 1..23: mol_type = other DNA
  modified_base 1: mod_base = OTHER; note = 2'-O-methyladenosine-3'-phosphorothioate
  modified_base 2: mod_base = OTHER; note = 2'-deoxycytidine-3'-phosphorothioate
  modified_base 3: mod_base = OTHER; note = 2'-O-methyluridine-3'-phosphate
  modified_base 4: mod_base = OTHER; note = 2'-O-methylcytidine-3'-phosphate
  modified_base 6: mod_base = OTHER; note = 2'-O-methylguanosine-3'-phosphate
  modified_base 8: mod_base = OTHER; note = 2'-O-methyluridine-3'-phosphate
  modified_base 9: mod_base = OTHER; note = 2'-O-methylguanosine-3'-phosphate
  modified_base 10: mod_base = OTHER; note = 2'-O-methylguanosine-3'-phosphate
  modified_base 11: mod_base = OTHER; note = 2'-O-methylcytidine-3'-phosphate
  modified_base 13: mod_base = OTHER; note = 2'-O-methylguanosine-3'-phosphate
  modified_base 14: mod_base = OTHER; note = 2'-fluorouridine-3'-phosphate
  modified_base 15: mod_base = OTHER; note = 2'-O-methyluridine-3'-phosphate
  modified_base 16: mod_base = OTHER; note = 2'-O-methylguanosine-3'-phosphate
  modified_base 17: mod_base = OTHER; note = 2'-O-methylcytidine-3'-phosphate
  modified_base 18: mod_base = OTHER; note = 2'-O-methyluridine-3'-phosphate
  modified_base 19: mod_base = OTHER; note = 2'-O-methylcytidine-3'-phosphate
  modified_base 20: mod_base = OTHER; note = 2'-O-methylcytidine-3'-phosphate
  modified_base 21: mod_base = OTHER; note = 2'-O-methylguanosine-3'-phosphorothioate
  modified_base 22: mod_base = OTHER; note = 2'-O-methyluridine-3'-phosphorothioate
  modified_base 23: mod_base = OTHER; note = 2'-O-methylcytidine-3'-phosphate
  misc_feature 1: note = RNA
  misc_feature 2: note = DNA
  misc_feature 3..4: note = RNA
  misc_feature 5: note = DNA
  misc_feature 6: note = RNA
  misc_feature 7: note = DNA
  misc_feature 8..11: note = RNA
  misc_feature 12: note = DNA
  misc_feature 13..23: note = RNA
actcggatggcagttgctccgtc

SEQ ID NO: 7304 - DNA, 23 bp, synthetic construct
  source 1..23: mol_type = other DNA
  modified_base 1: mod_base = OTHER; note = 2'-O-methyladenosine-3'-phosphorothioate
  modified_base 2: mod_base = OTHER; note = 2'-deoxycytidine-3'-phosphorothioate
  modified_base 3: mod_base = OTHER; note = 2'-O-methylcytidine-3'-phosphate
  modified_base 4: mod_base = OTHER; note = 2'-O-methyluridine-3'-phosphate
  modified_base 6: mod_base = OTHER; note = 2'-O-methylguanosine-3'-phosphate
  modified_base 8: mod_base = OTHER; note = 2'-O-methyladenosine-3'-phosphate
  modified_base 9: mod_base = OTHER; note = 2'-O-methyluridine-3'-phosphate
  modified_base 10: mod_base = OTHER; note = 2'-O-methylguanosine-3'-phosphate
  modified_base 11: mod_base = OTHER; note = 2'-O-methylguanosine-3'-phosphate
  modified_base 13: mod_base = OTHER; note = 2'-O-methyladenosine-3'-phosphate
  modified_base 14: mod_base = OTHER; note = 2'-fluoroguanosine-3'-phosphate
  modified_base 15: mod_base = OTHER; note = 2'-O-methyluridine-3'-phosphate
  modified_base 16: mod_base = OTHER; note = 2'-O-methyluridine-3'-phosphate
  modified_base 17: mod_base = OTHER; note = 2'-O-methylguanosine-3'-phosphate
  modified_base 18: mod_base = OTHER; note = 2'-O-methylcytidine-3'-phosphate
  modified_base 19: mod_base = OTHER; note = 2'-O-methyluridine-3'-phosphate
  modified_base 20: mod_base = OTHER; note = 2'-O-methylcytidine-3'-phosphate
  modified_base 21: mod_base = OTHER; note = 2'-O-methylcytidine-3'-phosphorothioate
  modified_base 22: mod_base = OTHER; note = 2'-O-methylguanosine-3'-phosphorothioate
  modified_base 23: mod_base = OTHER; note = 2'-O-methyluridine-3'-phosphate
  misc_feature 1: note = RNA
  misc_feature 2: note = DNA
  misc_feature 3..4: note = RNA
  misc_feature 5: note = DNA
  misc_feature 6: note = RNA
  misc_feature 7: note = DNA
  misc_feature 8..11: note = RNA
  misc_feature 12: note = DNA
  misc_feature 13..23: note = RNA
acctcggatggcagttgctccgt

SEQ ID NO: 7305 - DNA, 23 bp, synthetic construct
  source 1..23: mol_type = other DNA
  modified_base 1: mod_base = OTHER; note = 2'-O-methyladenosine-3'-phosphorothioate
  modified_base 2: mod_base = OTHER; note = 2'-deoxyadenosine-3'-phosphorothioate
  modified_base 3: mod_base = OTHER; note = 2'-O-methylguanosine-3'-phosphate
  modified_base 4: mod_base = OTHER; note = 2'-O-methylcytidine-3'-phosphate
  modified_base 6: mod_base = OTHER; note = 2'-O-methyluridine-3'-phosphate
  modified_base 8: mod_base = OTHER; note = 2'-O-methylguanosine-3'-phosphate
  modified_base 9: mod_base = OTHER; note = 2'-O-methylguanosine-3'-phosphate
  modified_base 10: mod_base = OTHER; note = 2'-O-methyladenosine-3'-phosphate
  modified_base 11: mod_base = OTHER; note = 2'-O-methyluridine-3'-phosphate
  modified_base 13: mod_base = OTHER; note = 2'-O-methylguanosine-3'-phosphate
  modified_base 14: mod_base = OTHER; note = 2'-fluorocytidine-3'-phosphate
  modified_base 15: mod_base = OTHER; note = 2'-O-methyladenosine-3'-phosphate
  modified_base 16: mod_base = OTHER; note = 2'-O-methylguanosine-3'-phosphate
  modified_base 17: mod_base = OTHER; note = 2'-O-methyluridine-3'-phosphate
  modified_base 18: mod_base = OTHER; note = 2'-O-methyluridine-3'-phosphate
  modified_base 19: mod_base = OTHER; note = 2'-O-methylguanosine-3'-phosphate
  modified_base 20: mod_base = OTHER; note = 2'-O-methylcytidine-3'-phosphate
  modified_base 21: mod_base = OTHER; note = 2'-O-methyluridine-3'-phosphorothioate
  modified_base 22: mod_base = OTHER; note = 2'-O-methylcytidine-3'-phosphorothioate
  modified_base 23: mod_base = OTHER; note = 2'-O-methylcytidine-3'-phosphate
  misc_feature 1: note = RNA
  misc_feature 2: note = DNA
  misc_feature 3..4: note = RNA
  misc_feature 5: note = DNA
  misc_feature 6: note = RNA
  misc_feature 7: note = DNA
  misc_feature 8..11: note = RNA
  misc_feature 12: note = DNA
  misc_feature 13..23: note = RNA
aagcctcggatggcagttgctcc

SEQ ID NO: 7306 - DNA, 23 bp, synthetic construct
  source 1..23: mol_type = other DNA
  modified_base 1: mod_base = OTHER; note = 2'-O-methyladenosine-3'-phosphorothioate
  modified_base 2: mod_base = OTHER; note = 2'-deoxyguanosine-3'-phosphorothioate
  modified_base 3: mod_base = OTHER; note = 2'-O-methyladenosine-3'-phosphate
  modified_base 4: mod_base = OTHER; note = 2'-O-methylguanosine-3'-phosphate
  modified_base 6: mod_base = OTHER; note = 2'-O-methylcytidine-3'-phosphate
  modified_base 8: mod_base = OTHER; note = 2'-O-methylcytidine-3'-phosphate
  modified_base 9: mod_base = OTHER; note = 2'-O-methylguanosine-3'-phosphate
  modified_base 10: mod_base = OTHER; note = 2'-O-methylguanosine-3'-phosphate
  modified_base 11: mod_base = OTHER; note = 2'-O-methyladenosine-3'-phosphate
  modified_base 13: mod_base = OTHER; note = 2'-O-methylguanosine-3'-phosphate
  modified_base 14: mod_base = OTHER; note = 2'-fluoroguanosine-3'-phosphate
  modified_base 15: mod_base = OTHER; note = 2'-O-methylcytidine-3'-phosphate
  modified_base 16: mod_base = OTHER; note = 2'-O-methyladenosine-3'-phosphate
  modified_base 17: mod_base = OTHER; note = 2'-O-methylguanosine-3'-phosphate
  modified_base 18: mod_base = OTHER; note = 2'-O-methyluridine-3'-phosphate
  modified_base 19: mod_base = OTHER; note = 2'-O-methyluridine-3'-phosphate
  modified_base 20: mod_base = OTHER; note = 2'-O-methylguanosine-3'-phosphate
  modified_base 21: mod_base = OTHER; note = 2'-O-methylcytidine-3'-phosphorothioate
  modified_base 22: mod_base = OTHER; note = 2'-O-methyluridine-3'-phosphorothioate
  modified_base 23: mod_base = OTHER; note = 2'-O-methylcytidine-3'-phosphate
  misc_feature 1: note = RNA
  misc_feature 2: note = DNA
  misc_feature 3..4: note = RNA
  misc_feature 5: note = DNA
  misc_feature 6: note = RNA
  misc_feature 7: note = DNA
  misc_feature 8..11: note = RNA
  misc_feature 12: note = DNA
  misc_feature 13..23: note = RNA
agagcctcggatggcagttgctc

SEQ ID NO: 7307 - DNA, 23 bp, synthetic construct
  source 1..23: mol_type = other DNA
  modified_base 1: mod_base = OTHER; note = 2'-O-methyladenosine-3'-phosphorothioate
  modified_base 2: mod_base = OTHER; note = 2'-deoxyguanosine-3'-phosphorothioate
  modified_base 3: mod_base = OTHER; note = 2'-O-methylguanosine-3'-phosphate
  modified_base 4: mod_base = OTHER; note = 2'-O-methyladenosine-3'-phosphate
  modified_base 6: mod_base = OTHER; note = 2'-O-methylcytidine-3'-phosphate
  modified_base 8: mod_base = OTHER; note = 2'-O-methyluridine-3'-phosphate
  modified_base 9: mod_base = OTHER; note = 2'-O-methylcytidine-3'-phosphate
  modified_base 10: mod_base = OTHER; note = 2'-O-methylguanosine-3'-phosphate
  modified_base 11: mod_base = OTHER; note = 2'-O-methylguanosine-3'-phosphate
  modified_base 13: mod_base = OTHER; note = 2'-O-methyluridine-3'-phosphate
  modified_base 14: mod_base = OTHER; note = 2'-fluoroguanosine-3'-phosphate
  modified_base 15: mod_base = OTHER; note = 2'-O-methylguanosine-3'-phosphate
  modified_base 16: mod_base = OTHER; note = 2'-O-methylcytidine-3'-phosphate
  modified_base 17: mod_base = OTHER; note = 2'-O-methyladenosine-3'-phosphate
  modified_base 18: mod_base = OTHER; note = 2'-O-methylguanosine-3'-phosphate
  modified_base 19: mod_base = OTHER; note = 2'-O-methyluridine-3'-phosphate
  modified_base 20: mod_base = OTHER; note = 2'-O-methyluridine-3'-phosphate
  modified_base 21: mod_base = OTHER; note = 2'-O-methylguanosine-3'-phosphorothioate
  modified_base 22: mod_base = OTHER; note = 2'-O-methylcytidine-3'-phosphorothioate
  modified_base 23: mod_base = OTHER; note = 2'-O-methyluridine-3'-phosphate
  misc_feature 1: note = RNA
  misc_feature 2: note = DNA
  misc_feature 3..4: note = RNA
  misc_feature 5: note = DNA
  misc_feature 6: note = RNA
  misc_feature 7: note = DNA
  misc_feature 8..11: note = RNA
  misc_feature 12: note = DNA
  misc_feature 13..23: note = RNA
aggagcctcggatggcagttgct

SEQ ID NO: 7308 - DNA, 23 bp, synthetic construct
  source 1..23: mol_type = other DNA
  modified_base 1: mod_base = OTHER; note = 2'-O-methyladenosine-3'-phosphorothioate
  modified_base 2: mod_base = OTHER; note = 2'-deoxyadenosine-3'-phosphorothioate
  modified_base 3: mod_base = OTHER; note = 2'-O-methylcytidine-3'-phosphate
  modified_base 4: mod_base = OTHER; note = 2'-O-methylcytidine-3'-phosphate
  modified_base 6: mod_base = OTHER; note = 2'-O-methylguanosine-3'-phosphate
  modified_base 8: mod_base = OTHER; note = 2'-O-methylguanosine-3'-phosphate
  modified_base 9: mod_base = OTHER; note = 2'-O-methylcytidine-3'-phosphate
  modified_base 10: mod_base = OTHER; note = 2'-O-methyluridine-3'-phosphate
  modified_base 11: mod_base = OTHER; note = 2'-O-methylcytidine-3'-phosphate
  modified_base 13: mod_base = OTHER; note = 2'-O-methyluridine-3'-phosphate
  modified_base 14: mod_base = OTHER; note = 2'-fluorouridine-3'-phosphate
  modified_base 15: mod_base = OTHER; note = 2'-O-methylcytidine-3'-phosphate
  modified_base 16: mod_base = OTHER; note = 2'-O-methyluridine-3'-phosphate
  modified_base 17: mod_base = OTHER; note = 2'-O-methylguanosine-3'-phosphate
  modified_base 18: mod_base = OTHER; note = 2'-O-methylcytidine-3'-phosphate
  modified_base 19: mod_base = OTHER; note = 2'-O-methyluridine-3'-phosphate
  modified_base 20: mod_base = OTHER; note = 2'-O-methyluridine-3'-phosphate
  modified_base 21: mod_base = OTHER; note = 2'-O-methylguanosine-3'-phosphorothioate
  modified_base 22: mod_base = OTHER; note = 2'-O-methylguanosine-3'-phosphorothioate
  modified_base 23: mod_base = OTHER; note = 2'-O-methylguanosine-3'-phosphate
  misc_feature 1: note = RNA
  misc_feature 2: note = DNA
  misc_feature 3..4: note = RNA
  misc_feature 5: note = DNA
  misc_feature 6: note = RNA
  misc_feature 7: note = DNA
  misc_feature 8..11: note = RNA
  misc_feature 12: note = DNA
  misc_feature 13..23: note = RNA
aaccagagctcgttctgcttggg

SEQ ID NO: 7309 - DNA, 23 bp, synthetic construct
  source 1..23: mol_type = other DNA
  modified_base 1: mod_base = OTHER; note = 2'-O-methyladenosine-3'-phosphorothioate
  modified_base 2: mod_base = OTHER; note = 2'-deoxycytidine-3'-phosphorothioate
  modified_base 3: mod_base = OTHER; note = 2'-O-methyladenosine-3'-phosphate
  modified_base 4: mod_base = OTHER; note = 2'-O-methylcytidine-3'-phosphate
  modified_base 6: mod_base = OTHER; note = 2'-O-methyladenosine-3'-phosphate
  modified_base 8: mod_base = OTHER; note = 2'-O-methyladenosine-3'-phosphate
  modified_base 9: mod_base = OTHER; note = 2'-O-methylguanosine-3'-phosphate
  modified_base 10: mod_base = OTHER; note = 2'-O-methylcytidine-3'-phosphate
  modified_base 11: mod_base = OTHER; note = 2'-O-methyluridine-3'-phosphate
  modified_base 13: mod_base = OTHER; note = 2'-O-methylguanosine-3'-phosphate
  modified_base 14: mod_base = OTHER; note = 2'-fluorouridine-3'-phosphate
  modified_base 15: mod_base = OTHER; note = 2'-O-methyluridine-3'-phosphate
  modified_base 16: mod_base = OTHER; note = 2'-O-methylcytidine-3'-phosphate
  modified_base 17: mod_base = OTHER; note = 2'-O-methyluridine-3'-phosphate
  modified_base 18: mod_base = OTHER; note = 2'-O-methylguanosine-3'-phosphate
  modified_base 19: mod_base = OTHER; note = 2'-O-methylcytidine-3'-phosphate
  modified_base 20: mod_base = OTHER; note = 2'-O-methyluridine-3'-phosphate
  modified_base 21: mod_base = OTHER; note = 2'-O-methyluridine-3'-phosphorothioate
  modified_base 22: mod_base = OTHER; note = 2'-O-methylguanosine-3'-phosphorothioate
  modified_base 23: mod_base = OTHER; note = 2'-O-methylguanosine-3'-phosphate
  misc_feature 1: note = RNA
  misc_feature 2: note = DNA
  misc_feature 3..4: note = RNA
  misc_feature 5: note = DNA
  misc_feature 6: note = RNA
  misc_feature 7: note = DNA
  misc_feature 8..11: note = RNA
  misc_feature 12: note = DNA
  misc_feature 13..23: note = RNA
acaccagagctcgttctgcttgg

SEQ ID NO: 7310 - DNA, 23 bp, synthetic construct
  source 1..23: mol_type = other DNA
  modified_base 1: mod_base = OTHER; note = 2'-O-methyladenosine-3'-phosphorothioate
  modified_base 2: mod_base = OTHER; note = 2'-deoxyguanosine-3'-phosphorothioate
  modified_base 3: mod_base = OTHER; note = 2'-O-methylcytidine-3'-phosphate
  modified_base 4: mod_base = OTHER; note = 2'-O-methyladenosine-3'-phosphate
  modified_base 6: mod_base = OTHER; note = 2'-O-methylcytidine-3'-phosphate
  modified_base 8: mod_base = OTHER; note = 2'-O-methylguanosine-3'-phosphate
  modified_base 9: mod_base = OTHER; note = 2'-O-methyladenosine-3'-phosphate
  modified_base 10: mod_base = OTHER; note = 2'-O-methylguanosine-3'-phosphate
  modified_base 11: mod_base = OTHER; note = 2'-O-methylcytidine-3'-phosphate
  modified_base 13: mod_base = OTHER; note = 2'-O-methylcytidine-3'-phosphate
  modified_base 14: mod_base = OTHER; note = 2'-fluoroguanosine-3'-phosphate
  modified_base 15: mod_base = OTHER; note = 2'-O-methyluridine-3'-phosphate
  modified_base 16: mod_base = OTHER; note = 2'-O-methyluridine-3'-phosphate
  modified_base 17: mod_base = OTHER; note = 2'-O-methylcytidine-3'-phosphate
  modified_base 18: mod_base = OTHER; note = 2'-O-methyluridine-3'-phosphate
  modified_base 19: mod_base = OTHER; note = 2'-O-methylguanosine-3'-phosphate
  modified_base 20: mod_base = OTHER; note = 2'-O-methylcytidine-3'-phosphate
  modified_base 21: mod_base = OTHER; note = 2'-O-methyluridine-3'-phosphorothioate
  modified_base 22: mod_base = OTHER; note = 2'-O-methyluridine-3'-phosphorothioate
  modified_base 23: mod_base = OTHER; note = 2'-O-methylguanosine-3'-phosphate
  misc_feature 1: note = RNA
  misc_feature 2: note = DNA
  misc_feature 3..4: note = RNA
  misc_feature 5: note = DNA
  misc_feature 6: note = RNA
  misc_feature 7: note = DNA
  misc_feature 8..11: note = RNA
  misc_feature 12: note = DNA
  misc_feature 13..23: note = RNA
agcaccagagctcgttctgcttg

SEQ ID NO: 7311 - DNA, 23 bp, synthetic construct
  source 1..23: mol_type = other DNA
  modified_base 1: mod_base = OTHER; note = 2'-O-methyladenosine-3'-phosphorothioate
  modified_base 2: mod_base = OTHER; note = 2'-deoxyadenosine-3'-phosphorothioate
  modified_base 3: mod_base = OTHER; note = 2'-O-methylguanosine-3'-phosphate
  modified_base 4: mod_base = OTHER; note = 2'-O-methylcytidine-3'-phosphate
  modified_base 6: mod_base = OTHER; note = 2'-O-methylcytidine-3'-phosphate
  modified_base 8: mod_base = OTHER; note = 2'-O-methyladenosine-3'-phosphate
  modified_base 9: mod_base = OTHER; note = 2'-O-methylguanosine-3'-phosphate
  modified_base 10: mod_base = OTHER; note = 2'-O-methyladenosine-3'-phosphate
  modified_base 11: mod_base = OTHER; note = 2'-O-methylguanosine-3'-phosphate
  modified_base 13: mod_base = OTHER; note = 2'-O-methyluridine-3'-phosphate
  modified_base 14: mod_base = OTHER; note = 2'-fluorocytidine-3'-phosphate
  modified_base 15: mod_base = OTHER; note = 2'-O-methylguanosine-3'-phosphate
  modified_base 16: mod_base = OTHER; note = 2'-O-methyluridine-3'-phosphate
  modified_base 17: mod_base = OTHER; note = 2'-O-methyluridine-3'-phosphate
  modified_base 18: mod_base = OTHER; note = 2'-O-methylcytidine-3'-phosphate
  modified_base 19: mod_base = OTHER; note = 2'-O-methyluridine-3'-phosphate
  modified_base 20: mod_base = OTHER; note = 2'-O-methylguanosine-3'-phosphate
  modified_base 21: mod_base = OTHER; note = 2'-O-methylcytidine-3'-phosphorothioate
  modified_base 22: mod_base = OTHER; note = 2'-O-methyluridine-3'-phosphorothioate
  modified_base 23: mod_base = OTHER; note = 2'-O-methyluridine-3'-phosphate
  misc_feature 1: note = RNA
  misc_feature 2: note = DNA
  misc_feature 3..4: note = RNA
  misc_feature 5: note = DNA
  misc_feature 6: note = RNA
  misc_feature 7: note = DNA
  misc_feature 8..11: note = RNA
  misc_feature 12: note = DNA
  misc_feature 13..23: note = RNA
aagcaccagagctcgttctgctt

SEQ ID NO: 7312 - DNA, 23 bp, synthetic construct
  source 1..23: mol_type = other DNA
  modified_base 1: mod_base = OTHER; note = 2'-O-methyladenosine-3'-phosphorothioate
  modified_base 2: mod_base = OTHER; note = 2'-deoxycytidine-3'-phosphorothioate
  modified_base 3: mod_base = OTHER; note = 2'-O-methyladenosine-3'-phosphate
  modified_base 4: mod_base = OTHER; note = 2'-O-methylguanosine-3'-phosphate
  modified_base 6: mod_base = OTHER; note = 2'-O-methyladenosine-3'-phosphate
  modified_base 8: mod_base = OTHER; note = 2'-O-methylcytidine-3'-phosphate
  modified_base 9: mod_base = OTHER; note = 2'-O-methyladenosine-3'-phosphate
  modified_base 10: mod_base = OTHER; note = 2'-O-methylguanosine-3'-phosphate
  modified_base 11: mod_base = OTHER; note = 2'-O-methyladenosine-3'-phosphate
  modified_base 13: mod_base = OTHER; note = 2'-O-methylcytidine-3'-phosphate
  modified_base 14: mod_base = OTHER; note = 2'-fluorouridine-3'-phosphate
  modified_base 15: mod_base = OTHER; note = 2'-O-methylcytidine-3'-phosphate
  modified_base 16: mod_base = OTHER; note = 2'-O-methylguanosine-3'-phosphate
  modified_base 17: mod_base = OTHER; note = 2'-O-methyluridine-3'-phosphate
  modified_base 18: mod_base = OTHER; note = 2'-O-methyluridine-3'-phosphate
  modified_base 19: mod_base = OTHER; note = 2'-O-methylcytidine-3'-phosphate
  modified_base 20: mod_base = OTHER; note = 2'-O-methyluridine-3'-phosphate
  modified_base 21: mod_base = OTHER; note = 2'-O-methylguanosine-3'-phosphorothioate
  modified_base 22: mod_base = OTHER; note = 2'-O-methylcytidine-3'-phosphorothioate
  modified_base 23: mod_base = OTHER; note = 2'-O-methyluridine-3'-phosphate
  misc_feature 1: note = RNA
  misc_feature 2: note = DNA
  misc_feature 3..4: note = RNA
  misc_feature 5: note = DNA
  misc_feature 6: note = RNA
  misc_feature 7: note = DNA
  misc_feature 8..11: note = RNA
  misc_feature 12: note = DNA
  misc_feature 13..23: note = RNA
acagcaccagagctcgttctgct

SEQ ID NO: 7313 - DNA, 23 bp, synthetic construct
  source 1..23: mol_type = other DNA
  modified_base 1: mod_base = OTHER; note = 2'-O-methyladenosine-3'-phosphorothioate
  modified_base 2: mod_base = OTHER; note = 2'-deoxycytidine-3'-phosphorothioate
  modified_base 3: mod_base = OTHER; note = 2'-O-methylcytidine-3'-phosphate
  modified_base 4: mod_base = OTHER; note = 2'-O-methyladenosine-3'-phosphate
  modified_base 6: mod_base = OTHER; note = 2'-O-methylcytidine-3'-phosphate
  modified_base 8: mod_base = OTHER; note = 2'-O-methylcytidine-3'-phosphate
  modified_base 9: mod_base = OTHER; note = 2'-O-methylcytidine-3'-phosphate
  modified_base 10: mod_base = OTHER; note = 2'-O-methyladenosine-3'-phosphate
  modified_base 11: mod_base = OTHER; note = 2'-O-methylguanosine-3'-phosphate
  modified_base 13: mod_base = OTHER; note = 2'-O-methylguanosine-3'-phosphate
  modified_base 14: mod_base = OTHER; note = 2'-fluorocytidine-3'-phosphate
  modified_base 15: mod_base = OTHER; note = 2'-O-methyluridine-3'-phosphate
  modified_base 16: mod_base = OTHER; note = 2'-O-methylcytidine-3'-phosphate
  modified_base 17: mod_base = OTHER; note = 2'-O-methylguanosine-3'-phosphate
  modified_base 18: mod_base = OTHER; note = 2'-O-methyluridine-3'-phosphate
  modified_base 19: mod_base = OTHER; note = 2'-O-methyluridine-3'-phosphate
  modified_base 20: mod_base = OTHER; note = 2'-O-methylcytidine-3'-phosphate
  modified_base 21: mod_base = OTHER; note = 2'-O-methyluridine-3'-phosphorothioate
  modified_base 22: mod_base = OTHER; note = 2'-O-methylguanosine-3'-phosphorothioate
  modified_base 23: mod_base = OTHER; note = 2'-O-methylcytidine-3'-phosphate
  misc_feature 1: note = RNA
  misc_feature 2: note = DNA
  misc_feature 3..4: note = RNA
  misc_feature 5: note = DNA
  misc_feature 6: note = RNA
  misc_feature 7: note = DNA
  misc_feature 8..11: note = RNA
  misc_feature 12: note = DNA
  misc_feature 13..23: note = RNA
accagcaccagagctcgttctgc

SEQ ID NO: 7314 - DNA, 23 bp, synthetic construct
  source 1..23: mol_type = other DNA
  modified_base 1: mod_base = OTHER; note = 2'-O-methyladenosine-3'-phosphorothioate
  modified_base 2: mod_base = OTHER; note = 2'-deoxythimidine-3'-phosphorothioate
  modified_base 3: mod_base = OTHER; note = 2'-O-methylcytidine-3'-phosphate
  modified_base 4: mod_base = OTHER; note = 2'-O-methylcytidine-3'-phosphate
  modified_base 6: mod_base = OTHER; note = 2'-O-methylguanosine-3'-phosphate
  modified_base 8: mod_base = OTHER; note = 2'-O-methyladenosine-3'-phosphate
  modified_base 9: mod_base = OTHER; note = 2'-O-methylcytidine-3'-phosphate
  modified_base 10: mod_base = OTHER; note = 2'-O-methylcytidine-3'-phosphate
  modified_base 11: mod_base = OTHER; note = 2'-O-methyladenosine-3'-phosphate
  modified_base 13: mod_base = OTHER; note = 2'-O-methyladenosine-3'-phosphate
  modified_base 14: mod_base = OTHER; note = 2'-fluoroguanosine-3'-phosphate
  modified_base 15: mod_base = OTHER; note = 2'-O-methylcytidine-3'-phosphate
  modified_base 16: mod_base = OTHER; note = 2'-O-methyluridine-3'-phosphate
  modified_base 17: mod_base = OTHER; note = 2'-O-methylcytidine-3'-phosphate
  modified_base 18: mod_base = OTHER; note = 2'-O-methylguanosine-3'-phosphate
  modified_base 19: mod_base = OTHER; note = 2'-O-methyluridine-3'-phosphate
  modified_base 20: mod_base = OTHER; note = 2'-O-methyluridine-3'-phosphate
  modified_base 21: mod_base = OTHER; note = 2'-O-methylcytidine-3'-phosphorothioate
  modified_base 22: mod_base = OTHER; note = 2'-O-methyluridine-3'-phosphorothioate
  modified_base 23: mod_base = OTHER; note = 2'-O-methylguanosine-3'-phosphate
  misc_feature 1: note = RNA
  misc_feature 2: note = DNA
  misc_feature 3..4: note = RNA
  misc_feature 5: note = DNA
  misc_feature 6: note = RNA
  misc_feature 7: note = DNA
  misc_feature 8..11: note = RNA
  misc_feature 12: note = DNA
  misc_feature 13..23: note = RNA
atccagcaccagagctcgttctg

SEQ ID NO: 7315 - DNA, 23 bp, synthetic construct
  source 1..23: mol_type = other DNA
  modified_base 1: mod_base = OTHER; note = 2'-O-methyladenosine-3'-phosphorothioate
  modified_base 2: mod_base = OTHER; note = 2'-deoxycytidine-3'-phosphorothioate
  modified_base 3: mod_base = OTHER; note = 2'-O-methyluridine-3'-phosphate
  modified_base 4: mod_base = OTHER; note = 2'-O-methylcytidine-3'-phosphate
  modified_base 6: mod_base = OTHER; note = 2'-O-methyladenosine-3'-phosphate
  modified_base 8: mod_base = OTHER; note = 2'-O-methylcytidine-3'-phosphate
  modified_base 9: mod_base = OTHER; note = 2'-O-methyladenosine-3'-phosphate
  modified_base 10: mod_base = OTHER; note = 2'-O-methylcytidine-3'-phosphate
  modified_base 11: mod_base = OTHER; note = 2'-O-methylcytidine-3'-phosphate
  modified_base 13: mod_base = OTHER; note = 2'-O-methylguanosine-3'-phosphate
  modified_base 14: mod_base = OTHER; note = 2'-fluoroadenosine-3'-phosphate
  modified_base 15: mod_base = OTHER; note = 2'-O-methylguanosine-3'-phosphate
  modified_base 16: mod_base = OTHER; note = 2'-O-methylcytidine-3'-phosphate
  modified_base 17: mod_base = OTHER; note = 2'-O-methyluridine-3'-phosphate
  modified_base 18: mod_base = OTHER; note = 2'-O-methylcytidine-3'-phosphate
  modified_base 19: mod_base = OTHER; note = 2'-O-methylguanosine-3'-phosphate
  modified_base 20: mod_base = OTHER; note = 2'-O-methyluridine-3'-phosphate
  modified_base 21: mod_base = OTHER; note = 2'-O-methyluridine-3'-phosphorothioate
  modified_base 22: mod_base = OTHER; note = 2'-O-methylcytidine-3'-phosphorothioate
  modified_base 23: mod_base = OTHER; note = 2'-O-methyluridine-3'-phosphate
  misc_feature 1: note = RNA
  misc_feature 2: note = DNA
  misc_feature 3..4: note = RNA
  misc_feature 5: note = DNA
  misc_feature 6: note = RNA
  misc_feature 7: note = DNA
  misc_feature 8..11: note = RNA
  misc_feature 12: note = DNA
  misc_feature 13..23: note = RNA
actccagcaccagagctcgttct

SEQ ID NO: 7316 - DNA, 23 bp, synthetic construct
  source 1..23: mol_type = other DNA
  modified_base 1: mod_base = OTHER; note = 2'-O-methyladenosine-3'-phosphorothioate
  modified_base 2: mod_base = OTHER; note = 2'-deoxyguanosine-3'-phosphorothioate
  modified_base 3: mod_base = OTHER; note = 2'-O-methylcytidine-3'-phosphate
  modified_base 4: mod_base = OTHER; note = 2'-O-methyluridine-3'-phosphate
  modified_base 6: mod_base = OTHER; note = 2'-O-methylcytidine-3'-phosphate
  modified_base 8: mod_base = OTHER; note = 2'-O-methylguanosine-3'-phosphate
  modified_base 9: mod_base = OTHER; note = 2'-O-methylcytidine-3'-phosphate
  modified_base 10: mod_base = OTHER; note = 2'-O-methyladenosine-3'-phosphate
  modified_base 11: mod_base = OTHER; note = 2'-O-methylcytidine-3'-phosphate
  modified_base 13: mod_base = OTHER; note = 2'-O-methyladenosine-3'-phosphate
  modified_base 14: mod_base = OTHER; note = 2'-fluoroguanosine-3'-phosphate
  modified_base 15: mod_base = OTHER; note = 2'-O-methyladenosine-3'-phosphate
  modified_base 16: mod_base = OTHER; note = 2'-O-methylguanosine-3'-phosphate
  modified_base 17: mod_base = OTHER; note = 2'-O-methylcytidine-3'-phosphate
  modified_base 18: mod_base = OTHER; note = 2'-O-methyluridine-3'-phosphate
  modified_base 19: mod_base = OTHER; note = 2'-O-methylcytidine-3'-phosphate
  modified_base 20: mod_base = OTHER; note = 2'-O-methylguanosine-3'-phosphate
  modified_base 21: mod_base = OTHER; note = 2'-O-methyluridine-3'-phosphorothioate
  modified_base 22: mod_base = OTHER; note = 2'-O-methyluridine-3'-phosphorothioate
  modified_base 23: mod_base = OTHER; note = 2'-O-methylcytidine-3'-phosphate
  misc_feature 1: note = RNA
  misc_feature 2: note = DNA
  misc_feature 3..4: note = RNA
  misc_feature 5: note = DNA
  misc_feature 6: note = RNA
  misc_feature 7: note = DNA
  misc_feature 8..11: note = RNA
  misc_feature 12: note = DNA
  misc_feature 13..23: note = RNA
agctccagcaccagagctcgttc

SEQ ID NO: 7317 - DNA, 23 bp, synthetic construct
  source 1..23: mol_type = other DNA
  modified_base 1: mod_base = OTHER; note = 2'-O-methyladenosine-3'-phosphorothioate
  modified_base 2: mod_base = OTHER; note = 2'-deoxythimidine-3'-phosphorothioate
  modified_base 3: mod_base = OTHER; note = 2'-O-methyladenosine-3'-phosphate
  modified_base 4: mod_base = OTHER; note = 2'-O-methylguanosine-3'-phosphate
  modified_base 6: mod_base = OTHER; note = 2'-O-methyluridine-3'-phosphate
  modified_base 8: mod_base = OTHER; note = 2'-O-methylcytidine-3'-phosphate
  modified_base 9: mod_base = OTHER; note = 2'-O-methyladenosine-3'-phosphate
  modified_base 10: mod_base = OTHER; note = 2'-O-methylguanosine-3'-phosphate
  modified_base 11: mod_base = OTHER; note = 2'-O-methylcytidine-3'-phosphate
  modified_base 13: mod_base = OTHER; note = 2'-O-methylcytidine-3'-phosphate
  modified_base 14: mod_base = OTHER; note = 2'-fluorocytidine-3'-phosphate
  modified_base 15: mod_base = OTHER; note = 2'-O-methyladenosine-3'-phosphate
  modified_base 16: mod_base = OTHER; note = 2'-O-methylguanosine-3'-phosphate
  modified_base 17: mod_base = OTHER; note = 2'-O-methyladenosine-3'-phosphate
  modified_base 18: mod_base = OTHER; note = 2'-O-methylguanosine-3'-phosphate
  modified_base 19: mod_base = OTHER; note = 2'-O-methylcytidine-3'-phosphate
  modified_base 20: mod_base = OTHER; note = 2'-O-methyluridine-3'-phosphate
  modified_base 21: mod_base = OTHER; note = 2'-O-methylcytidine-3'-phosphorothioate
  modified_base 22: mod_base = OTHER; note = 2'-O-methylguanosine-3'-phosphorothioate
  modified_base 23: mod_base = OTHER; note = 2'-O-methyluridine-3'-phosphate
  misc_feature 1: note = RNA
  misc_feature 2: note = DNA
  misc_feature 3..4: note = RNA
  misc_feature 5: note = DNA
  misc_feature 6: note = RNA
  misc_feature 7: note = DNA
  misc_feature 8..11: note = RNA
  misc_feature 12: note = DNA
  misc_feature 13..23: note = RNA
atagctccagcaccagagctcgt

SEQ ID NO: 7318 - DNA, 23 bp, synthetic construct
  source 1..23: mol_type = other DNA
  modified_base 1: mod_base = OTHER; note = 2'-O-methyladenosine-3'-phosphorothioate
  modified_base 2: mod_base = OTHER; note = 2'-deoxyguanosine-3'-phosphorothioate
  modified_base 3: mod_base = OTHER; note = 2'-O-methylcytidine-3'-phosphate
  modified_base 4: mod_base = OTHER; note = 2'-O-methyluridine-3'-phosphate
  modified_base 6: mod_base = OTHER; note = 2'-O-methylguanosine-3'-phosphate
  modified_base 8: mod_base = OTHER; note = 2'-O-methyluridine-3'-phosphate
  modified_base 9: mod_base = OTHER; note = 2'-O-methylcytidine-3'-phosphate
  modified_base 10: mod_base = OTHER; note = 2'-O-methylcytidine-3'-phosphate
  modified_base 11: mod_base = OTHER; note = 2'-O-methyladenosine-3'-phosphate
  modified_base 13: mod_base = OTHER; note = 2'-O-methylcytidine-3'-phosphate
  modified_base 14: mod_base = OTHER; note = 2'-fluoroadenosine-3'-phosphate
  modified_base 15: mod_base = OTHER; note = 2'-O-methylcytidine-3'-phosphate
  modified_base 16: mod_base = OTHER; note = 2'-O-methylcytidine-3'-phosphate
  modified_base 17: mod_base = OTHER; note = 2'-O-methyladenosine-3'-phosphate
  modified_base 18: mod_base = OTHER; note = 2'-O-methylguanosine-3'-phosphate
  modified_base 19: mod_base = OTHER; note = 2'-O-methyladenosine-3'-phosphate
  modified_base 20: mod_base = OTHER; note = 2'-O-methylguanosine-3'-phosphate
  modified_base 21: mod_base = OTHER; note = 2'-O-methylcytidine-3'-phosphorothioate
  modified_base 22: mod_base = OTHER; note = 2'-O-methyluridine-3'-phosphorothioate
  modified_base 23: mod_base = OTHER; note = 2'-O-methylcytidine-3'-phosphate
  misc_feature 1: note = RNA
  misc_feature 2: note = DNA
  misc_feature 3..4: note = RNA
  misc_feature 5: note = DNA
  misc_feature 6: note = RNA
  misc_feature 7: note = DNA
  misc_feature 8..11: note = RNA
  misc_feature 12: note = DNA
  misc_feature 13..23: note = RNA
agctagctccagcaccagagctc

SEQ ID NO: 7319 - DNA, 23 bp, synthetic construct
  source 1..23: mol_type = other DNA
  modified_base 1: mod_base = OTHER; note = 2'-O-methyladenosine-3'-phosphorothioate
  modified_base 2: mod_base = OTHER; note = 2'-deoxyguanosine-3'-phosphorothioate
  modified_base 3: mod_base = OTHER; note = 2'-O-methylguanosine-3'-phosphate
  modified_base 4: mod_base = OTHER; note = 2'-O-methylcytidine-3'-phosphate
  modified_base 6: mod_base = OTHER; note = 2'-O-methyladenosine-3'-phosphate
  modified_base 8: mod_base = OTHER; note = 2'-O-methylcytidine-3'-phosphate
  modified_base 9: mod_base = OTHER; note = 2'-O-methyluridine-3'-phosphate
  modified_base 10: mod_base = OTHER; note = 2'-O-methylcytidine-3'-phosphate
  modified_base 11: mod_base = OTHER; note = 2'-O-methylcytidine-3'-phosphate
  modified_base 13: mod_base = OTHER; note = 2'-O-methylguanosine-3'-phosphate
  modified_base 14: mod_base = OTHER; note = 2'-fluorocytidine-3'-phosphate
  modified_base 15: mod_base = OTHER; note = 2'-O-methyladenosine-3'-phosphate
  modified_base 16: mod_base = OTHER; note = 2'-O-methylcytidine-3'-phosphate
  modified_base 17: mod_base = OTHER; note = 2'-O-methylcytidine-3'-phosphate
  modified_base 18: mod_base = OTHER; note = 2'-O-methyladenosine-3'-phosphate
  modified_base 19: mod_base = OTHER; note = 2'-O-methylguanosine-3'-phosphate
  modified_base 20: mod_base = OTHER; note = 2'-O-methyladenosine-3'-phosphate
  modified_base 21: mod_base = OTHER; note = 2'-O-methylguanosine-3'-phosphorothioate
  modified_base 22: mod_base = OTHER; note = 2'-O-methylcytidine-3'-phosphorothioate
  modified_base 23: mod_base = OTHER; note = 2'-O-methyluridine-3'-phosphate
  misc_feature 1: note = RNA
  misc_feature 2: note = DNA
  misc_feature 3..4: note = RNA
  misc_feature 5: note = DNA
  misc_feature 6: note = RNA
  misc_feature 7: note = DNA
  misc_feature 8..11: note = RNA
  misc_feature 12: note = DNA
  misc_feature 13..23: note = RNA
aggctagctccagcaccagagct

SEQ ID NO: 7320 - DNA, 23 bp, synthetic construct
  source 1..23: mol_type = other DNA
  modified_base 1: mod_base = OTHER; note = 2'-O-methyladenosine-3'-phosphorothioate
  modified_base 2: mod_base = OTHER; note = 2'-deoxythimidine-3'-phosphorothioate
  modified_base 3: mod_base = OTHER; note = 2'-O-methylguanosine-3'-phosphate
  modified_base 4: mod_base = OTHER; note = 2'-O-methylguanosine-3'-phosphate
  modified_base 6: mod_base = OTHER; note = 2'-O-methyluridine-3'-phosphate
  modified_base 8: mod_base = OTHER; note = 2'-O-methylguanosine-3'-phosphate
  modified_base 9: mod_base = OTHER; note = 2'-O-methylcytidine-3'-phosphate
  modified_base 10: mod_base = OTHER; note = 2'-O-methyluridine-3'-phosphate
  modified_base 11: mod_base = OTHER; note = 2'-O-methylcytidine-3'-phosphate
  modified_base 13: mod_base = OTHER; note = 2'-O-methyladenosine-3'-phosphate
  modified_base 14: mod_base = OTHER; note = 2'-fluoroguanosine-3'-phosphate
  modified_base 15: mod_base = OTHER; note = 2'-O-methylcytidine-3'-phosphate
  modified_base 16: mod_base = OTHER; note = 2'-O-methyladenosine-3'-phosphate
  modified_base 17: mod_base = OTHER; note = 2'-O-methylcytidine-3'-phosphate
  modified_base 18: mod_base = OTHER; note = 2'-O-methylcytidine-3'-phosphate
  modified_base 19: mod_base = OTHER; note = 2'-O-methyladenosine-3'-phosphate
  modified_base 20: mod_base = OTHER; note = 2'-O-methylguanosine-3'-phosphate
  modified_base 21: mod_base = OTHER; note = 2'-O-methyladenosine-3'-phosphorothioate
  modified_base 22: mod_base = OTHER; note = 2'-O-methylguanosine-3'-phosphorothioate
  modified_base 23: mod_base = OTHER; note = 2'-O-methylcytidine-3'-phosphate
  misc_feature 1: note = RNA
  misc_feature 2: note = DNA
  misc_feature 3..4: note = RNA
  misc_feature 5: note = DNA
  misc_feature 6: note = RNA
  misc_feature 7: note = DNA
  misc_feature 8..11: note = RNA
  misc_feature 12: note = DNA
  misc_feature 13..23: note = RNA
atggctagctccagcaccagagc

SEQ ID NO: 7321 - DNA, 23 bp, synthetic construct
  source 1..23: mol_type = other DNA
  modified_base 1: mod_base = OTHER; note = 2'-O-methyladenosine-3'-phosphorothioate
  modified_base 2: mod_base = OTHER; note = 2'-deoxythimidine-3'-phosphorothioate
  modified_base 3: mod_base = OTHER; note = 2'-O-methyluridine-3'-phosphate
  modified_base 4: mod_base = OTHER; note = 2'-O-methylguanosine-3'-phosphate
  modified_base 6: mod_base = OTHER; note = 2'-O-methylcytidine-3'-phosphate
  modified_base 8: mod_base = OTHER; note = 2'-O-methyladenosine-3'-phosphate
  modified_base 9: mod_base = OTHER; note = 2'-O-methylguanosine-3'-phosphate
  modified_base 10: mod_base = OTHER; note = 2'-O-methylcytidine-3'-phosphate
  modified_base 11: mod_base = OTHER; note = 2'-O-methyluridine-3'-phosphate
  modified_base 13: mod_base = OTHER; note = 2'-O-methylcytidine-3'-phosphate
  modified_base 14: mod_base = OTHER; note = 2'-fluoroadenosine-3'-phosphate
  modified_base 15: mod_base = OTHER; note = 2'-O-methylguanosine-3'-phosphate
  modified_base 16: mod_base = OTHER; note = 2'-O-methylcytidine-3'-phosphate
  modified_base 17: mod_base = OTHER; note = 2'-O-methyladenosine-3'-phosphate
  modified_base 18: mod_base = OTHER; note = 2'-O-methylcytidine-3'-phosphate
  modified_base 19: mod_base = OTHER; note = 2'-O-methylcytidine-3'-phosphate
  modified_base 20: mod_base = OTHER; note = 2'-O-methyladenosine-3'-phosphate
  modified_base 21: mod_base = OTHER; note = 2'-O-methylguanosine-3'-phosphorothioate
  modified_base 22: mod_base = OTHER; note = 2'-O-methyladenosine-3'-phosphorothioate
  modified_base 23: mod_base = OTHER; note = 2'-O-methylguanosine-3'-phosphate
  misc_feature 1: note = RNA
  misc_feature 2: note = DNA
  misc_feature 3..4: note = RNA
  misc_feature 5: note = DNA
  misc_feature 6: note = RNA
  misc_feature 7: note = DNA
  misc_feature 8..11: note = RNA
  misc_feature 12: note = DNA
  misc_feature 13..23: note = RNA
attggctagctccagcaccagag

SEQ ID NO: 7322 - DNA, 23 bp, synthetic construct
  source 1..23: mol_type = other DNA
  modified_base 1: mod_base = OTHER; note = 2'-O-methyladenosine-3'-phosphorothioate
  modified_base 2: mod_base = OTHER; note = 2'-deoxycytidine-3'-phosphorothioate
  modified_base 3: mod_base = OTHER; note = 2'-O-methyluridine-3'-phosphate
  modified_base 4: mod_base = OTHER; note = 2'-O-methyluridine-3'-phosphate
  modified_base 6: mod_base = OTHER; note = 2'-O-methylguanosine-3'-phosphate
  modified_base 8: mod_base = OTHER; note = 2'-O-methyluridine-3'-phosphate
  modified_base 9: mod_base = OTHER; note = 2'-O-methyladenosine-3'-phosphate
  modified_base 10: mod_base = OTHER; note = 2'-O-methylguanosine-3'-phosphate
  modified_base 11: mod_base = OTHER; note = 2'-O-methylcytidine-3'-phosphate
  modified_base 13: mod_base = OTHER; note = 2'-O-methylcytidine-3'-phosphate
  modified_base 14: mod_base = OTHER; note = 2'-fluorocytidine-3'-phosphate
  modified_base 15: mod_base = OTHER; note = 2'-O-methyladenosine-3'-phosphate
  modified_base 16: mod_base = OTHER; note = 2'-O-methylguanosine-3'-phosphate
  modified_base 17: mod_base = OTHER; note = 2'-O-methylcytidine-3'-phosphate
  modified_base 18: mod_base = OTHER; note = 2'-O-methyladenosine-3'-phosphate
  modified_base 19: mod_base = OTHER; note = 2'-O-methylcytidine-3'-phosphate
  modified_base 20: mod_base = OTHER; note = 2'-O-methylcytidine-3'-phosphate
  modified_base 21: mod_base = OTHER; note = 2'-O-methyladenosine-3'-phosphorothioate
  modified_base 22: mod_base = OTHER; note = 2'-O-methylguanosine-3'-phosphorothioate
  modified_base 23: mod_base = OTHER; note = 2'-O-methyladenosine-3'-phosphate
  misc_feature 1: note = RNA
  misc_feature 2: note = DNA
  misc_feature 3..4: note = RNA
  misc_feature 5: note = DNA
  misc_feature 6: note = RNA
  misc_feature 7: note = DNA
  misc_feature 8..11: note = RNA
  misc_feature 12: note = DNA
  misc_feature 13..23: note = RNA
acttggctagctccagcaccaga

SEQ ID NO: 7323 - DNA, 23 bp, synthetic construct
  source 1..23: mol_type = other DNA
  modified_base 1: mod_base = OTHER; note = 2'-O-methyladenosine-3'-phosphorothioate
  modified_base 2: mod_base = OTHER; note = 2'-deoxyguanosine-3'-phosphorothioate
  modified_base 3: mod_base = OTHER; note = 2'-O-methylcytidine-3'-phosphate
  modified_base 4: mod_base = OTHER; note = 2'-O-methyluridine-3'-phosphate
  modified_base 6: mod_base = OTHER; note = 2'-O-methylguanosine-3'-phosphate
  modified_base 8: mod_base = OTHER; note = 2'-O-methylcytidine-3'-phosphate
  modified_base 9: mod_base = OTHER; note = 2'-O-methyluridine-3'-phosphate
  modified_base 10: mod_base = OTHER; note = 2'-O-methyladenosine-3'-phosphate
  modified_base 11: mod_base = OTHER; note = 2'-O-methylguanosine-3'-phosphate
  modified_base 13: mod_base = OTHER; note = 2'-O-methyluridine-3'-phosphate
  modified_base 14: mod_base = OTHER; note = 2'-fluorocytidine-3'-phosphate
  modified_base 15: mod_base = OTHER; note = 2'-O-methylcytidine-3'-phosphate
  modified_base 16: mod_base = OTHER; note = 2'-O-methyladenosine-3'-phosphate
  modified_base 17: mod_base = OTHER; note = 2'-O-methylguanosine-3'-phosphate
  modified_base 18: mod_base = OTHER; note = 2'-O-methylcytidine-3'-phosphate
  modified_base 19: mod_base = OTHER; note = 2'-O-methyladenosine-3'-phosphate
  modified_base 20: mod_base = OTHER; note = 2'-O-methylcytidine-3'-phosphate
  modified_base 21: mod_base = OTHER; note = 2'-O-methylcytidine-3'-phosphorothioate
  modified_base 22: mod_base = OTHER; note = 2'-O-methyladenosine-3'-phosphorothioate
  modified_base 23: mod_base = OTHER; note = 2'-O-methylguanosine-3'-phosphate
  misc_feature 1: note = RNA
  misc_feature 2: note = DNA
  misc_feature 3..4: note = RNA
  misc_feature 5: note = DNA
  misc_feature 6: note = RNA
  misc_feature 7: note = DNA
  misc_feature 8..11: note = RNA
  misc_feature 12: note = DNA
  misc_feature 13..23: note = RNA
agcttggctagctccagcaccag

SEQ ID NO: 7324 - DNA, 23 bp, synthetic construct
  source 1..23: mol_type = other DNA
  modified_base 1: mod_base = OTHER; note = 2'-O-methyladenosine-3'-phosphorothioate
  modified_base 2: mod_base = OTHER; note = 2'-deoxythimidine-3'-phosphorothioate
  modified_base 3: mod_base = OTHER; note = 2'-O-methylguanosine-3'-phosphate
  modified_base 4: mod_base = OTHER; note = 2'-O-methylcytidine-3'-phosphate
  modified_base 6: mod_base = OTHER; note = 2'-O-methyluridine-3'-phosphate
  modified_base 8: mod_base = OTHER; note = 2'-O-methylguanosine-3'-phosphate
  modified_base 9: mod_base = OTHER; note = 2'-O-methylcytidine-3'-phosphate
  modified_base 10: mod_base = OTHER; note = 2'-O-methyluridine-3'-phosphate
  modified_base 11: mod_base = OTHER; note = 2'-O-methyladenosine-3'-phosphate
  modified_base 13: mod_base = OTHER; note = 2'-O-methylcytidine-3'-phosphate
  modified_base 14: mod_base = OTHER; note = 2'-fluorouridine-3'-phosphate
  modified_base 15: mod_base = OTHER; note = 2'-O-methylcytidine-3'-phosphate
  modified_base 16: mod_base = OTHER; note = 2'-O-methylcytidine-3'-phosphate
  modified_base 17: mod_base = OTHER; note = 2'-O-methyladenosine-3'-phosphate
  modified_base 18: mod_base = OTHER; note = 2'-O-methylguanosine-3'-phosphate
  modified_base 19: mod_base = OTHER; note = 2'-O-methylcytidine-3'-phosphate
  modified_base 20: mod_base = OTHER; note = 2'-O-methyladenosine-3'-phosphate
  modified_base 21: mod_base = OTHER; note = 2'-O-methylcytidine-3'-phosphorothioate
  modified_base 22: mod_base = OTHER; note = 2'-O-methylcytidine-3'-phosphorothioate
  modified_base 23: mod_base = OTHER; note = 2'-O-methyladenosine-3'-phosphate
  misc_feature 1: note = RNA
  misc_feature 2: note = DNA
  misc_feature 3..4: note = RNA
  misc_feature 5: note = DNA
  misc_feature 6: note = RNA
  misc_feature 7: note = DNA
  misc_feature 8..11: note = RNA
  misc_feature 12: note = DNA
  misc_feature 13..23: note = RNA
atgcttggctagctccagcacca

SEQ ID NO: 7325 - DNA, 23 bp, synthetic construct
  source 1..23: mol_type = other DNA
  modified_base 1: mod_base = OTHER; note = 2'-O-methyladenosine-3'-phosphorothioate
  modified_base 2: mod_base = OTHER; note = 2'-deoxycytidine-3'-phosphorothioate
  modified_base 3: mod_base = OTHER; note = 2'-O-methyluridine-3'-phosphate
  modified_base 4: mod_base = OTHER; note = 2'-O-methylguanosine-3'-phosphate
  modified_base 6: mod_base = OTHER; note = 2'-O-methyluridine-3'-phosphate
  modified_base 8: mod_base = OTHER; note = 2'-O-methylguanosine-3'-phosphate
  modified_base 9: mod_base = OTHER; note = 2'-O-methylguanosine-3'-phosphate
  modified_base 10: mod_base = OTHER; note = 2'-O-methylcytidine-3'-phosphate
  modified_base 11: mod_base = OTHER; note = 2'-O-methyluridine-3'-phosphate
  modified_base 13: mod_base = OTHER; note = 2'-O-methylguanosine-3'-phosphate
  modified_base 14: mod_base = OTHER; note = 2'-fluorocytidine-3'-phosphate
  modified_base 15: mod_base = OTHER; note = 2'-O-methyluridine-3'-phosphate
  modified_base 16: mod_base = OTHER; note = 2'-O-methylcytidine-3'-phosphate
  modified_base 17: mod_base = OTHER; note = 2'-O-methylcytidine-3'-phosphate
  modified_base 18: mod_base = OTHER; note = 2'-O-methyladenosine-3'-phosphate
  modified_base 19: mod_base = OTHER; note = 2'-O-methylguanosine-3'-phosphate
  modified_base 20: mod_base = OTHER; note = 2'-O-methylcytidine-3'-phosphate
  modified_base 21: mod_base = OTHER; note = 2'-O-methyladenosine-3'-phosphorothioate
  modified_base 22: mod_base = OTHER; note = 2'-O-methylcytidine-3'-phosphorothioate
  modified_base 23: mod_base = OTHER; note = 2'-O-methylcytidine-3'-phosphate
  misc_feature 1: note = RNA
  misc_feature 2: note = DNA
  misc_feature 3..4: note = RNA
  misc_feature 5: note = DNA
  misc_feature 6: note = RNA
  misc_feature 7: note = DNA
  misc_feature 8..11: note = RNA
  misc_feature 12: note = DNA
  misc_feature 13..23: note = RNA
actgcttggctagctccagcacc

SEQ ID NO: 7326 - DNA, 23 bp, synthetic construct
  source 1..23: mol_type = other DNA
  modified_base 1: mod_base = OTHER; note = 2'-O-methyladenosine-3'-phosphorothioate
  modified_base 2: mod_base = OTHER; note = 2'-deoxythimidine-3'-phosphorothioate
  modified_base 3: mod_base = OTHER; note = 2'-O-methyluridine-3'-phosphate
  modified_base 4: mod_base = OTHER; note = 2'-O-methyluridine-3'-phosphate
  modified_base 6: mod_base = OTHER; note = 2'-O-methylcytidine-3'-phosphate
  modified_base 8: mod_base = OTHER; note = 2'-O-methylguanosine-3'-phosphate
  modified_base 9: mod_base = OTHER; note = 2'-O-methylcytidine-3'-phosphate
  modified_base 10: mod_base = OTHER; note = 2'-O-methyluridine-3'-phosphate
  modified_base 11: mod_base = OTHER; note = 2'-O-methyluridine-3'-phosphate
  modified_base 13: mod_base = OTHER; note = 2'-O-methylguanosine-3'-phosphate
  modified_base 14: mod_base = OTHER; note = 2'-fluorocytidine-3'-phosphate
  modified_base 15: mod_base = OTHER; note = 2'-O-methyluridine-3'-phosphate
  modified_base 16: mod_base = OTHER; note = 2'-O-methyladenosine-3'-phosphate
  modified_base 17: mod_base = OTHER; note = 2'-O-methylguanosine-3'-phosphate
  modified_base 18: mod_base = OTHER; note = 2'-O-methylcytidine-3'-phosphate
  modified_base 19: mod_base = OTHER; note = 2'-O-methyluridine-3'-phosphate
  modified_base 20: mod_base = OTHER; note = 2'-O-methylcytidine-3'-phosphate
  modified_base 21: mod_base = OTHER; note = 2'-O-methylcytidine-3'-phosphorothioate
  modified_base 22: mod_base = OTHER; note = 2'-O-methyladenosine-3'-phosphorothioate
  modified_base 23: mod_base = OTHER; note = 2'-O-methylguanosine-3'-phosphate
  misc_feature 1: note = RNA
  misc_feature 2: note = DNA
  misc_feature 3..4: note = RNA
  misc_feature 5: note = DNA
  misc_feature 6: note = RNA
  misc_feature 7: note = DNA
  misc_feature 8..11: note = RNA
  misc_feature 12: note = DNA
  misc_feature 13..23: note = RNA
atttgctgcttggctagctccag

SEQ ID NO: 7327 - DNA, 23 bp, synthetic construct
  source 1..23: mol_type = other DNA
  modified_base 1: mod_base = OTHER; note = 2'-O-methyladenosine-3'-phosphorothioate
  modified_base 2: mod_base = OTHER; note = 2'-deoxyadenosine-3'-phosphorothioate
  modified_base 3: mod_base = OTHER; note = 2'-O-methyluridine-3'-phosphate
  modified_base 4: mod_base = OTHER; note = 2'-O-methyluridine-3'-phosphate
  modified_base 6: mod_base = OTHER; note = 2'-O-methylguanosine-3'-phosphate
  modified_base 8: mod_base = OTHER; note = 2'-O-methyluridine-3'-phosphate
  modified_base 9: mod_base = OTHER; note = 2'-O-methylguanosine-3'-phosphate
  modified_base 10: mod_base = OTHER; note = 2'-O-methylcytidine-3'-phosphate
  modified_base 11: mod_base = OTHER; note = 2'-O-methyluridine-3'-phosphate
  modified_base 13: mod_base = OTHER; note = 2'-O-methylguanosine-3'-phosphate
  modified_base 14: mod_base = OTHER; note = 2'-fluoroguanosine-3'-phosphate
  modified_base 15: mod_base = OTHER; note = 2'-O-methylcytidine-3'-phosphate
  modified_base 16: mod_base = OTHER; note = 2'-O-methyluridine-3'-phosphate
  modified_base 17: mod_base = OTHER; note = 2'-O-methyladenosine-3'-phosphate
  modified_base 18: mod_base = OTHER; note = 2'-O-methylguanosine-3'-phosphate
  modified_base 19: mod_base = OTHER; note = 2'-O-methylcytidine-3'-phosphate
  modified_base 20: mod_base = OTHER; note = 2'-O-methyluridine-3'-phosphate
  modified_base 21: mod_base = OTHER; note = 2'-O-methylcytidine-3'-phosphorothioate
  modified_base 22: mod_base = OTHER; note = 2'-O-methylcytidine-3'-phosphorothioate
  modified_base 23: mod_base = OTHER; note = 2'-O-methyladenosine-3'-phosphate
  misc_feature 1: note = RNA
  misc_feature 2: note = DNA
  misc_feature 3..4: note = RNA
  misc_feature 5: note = DNA
  misc_feature 6: note = RNA
  misc_feature 7: note = DNA
  misc_feature 8..11: note = RNA
  misc_feature 12: note = DNA
  misc_feature 13..23: note = RNA
aatttgctgcttggctagctcca

SEQ ID NO: 7328 - DNA, 23 bp, synthetic construct
  source 1..23: mol_type = other DNA
  modified_base 1: mod_base = OTHER; note = 2'-O-methyladenosine-3'-phosphorothioate
  modified_base 2: mod_base = OTHER; note = 2'-deoxyguanosine-3'-phosphorothioate
  modified_base 3: mod_base = OTHER; note = 2'-O-methyladenosine-3'-phosphate
  modified_base 4: mod_base = OTHER; note = 2'-O-methyluridine-3'-phosphate
  modified_base 6: mod_base = OTHER; note = 2'-O-methyluridine-3'-phosphate
  modified_base 8: mod_base = OTHER; note = 2'-O-methylcytidine-3'-phosphate
  modified_base 9: mod_base = OTHER; note = 2'-O-methyluridine-3'-phosphate
  modified_base 10: mod_base = OTHER; note = 2'-O-methylguanosine-3'-phosphate
  modified_base 11: mod_base = OTHER; note = 2'-O-methylcytidine-3'-phosphate
  modified_base 13: mod_base = OTHER; note = 2'-O-methyluridine-3'-phosphate
  modified_base 14: mod_base = OTHER; note = 2'-fluoroguanosine-3'-phosphate
  modified_base 15: mod_base = OTHER; note = 2'-O-methylguanosine-3'-phosphate
  modified_base 16: mod_base = OTHER; note = 2'-O-methylcytidine-3'-phosphate
  modified_base 17: mod_base = OTHER; note = 2'-O-methyluridine-3'-phosphate
  modified_base 18: mod_base = OTHER; note = 2'-O-methyladenosine-3'-phosphate
  modified_base 19: mod_base = OTHER; note = 2'-O-methylguanosine-3'-phosphate
  modified_base 20: mod_base = OTHER; note = 2'-O-methylcytidine-3'-phosphate
  modified_base 21: mod_base = OTHER; note = 2'-O-methyluridine-3'-phosphorothioate
  modified_base 22: mod_base = OTHER; note = 2'-O-methylcytidine-3'-phosphorothioate
  modified_base 23: mod_base = OTHER; note = 2'-O-methylcytidine-3'-phosphate
  misc_feature 1: note = RNA
  misc_feature 2: note = DNA
  misc_feature 3..4: note = RNA
  misc_feature 5: note = DNA
  misc_feature 6: note = RNA
  misc_feature 7: note = DNA
  misc_feature 8..11: note = RNA
  misc_feature 12: note = DNA
  misc_feature 13..23: note = RNA
agatttgctgcttggctagctcc

SEQ ID NO: 7329 - DNA, 23 bp, synthetic construct
  source 1..23: mol_type = other DNA
  modified_base 1: mod_base = OTHER; note = 2'-O-methyladenosine-3'-phosphorothioate
  modified_base 2: mod_base = OTHER; note = 2'-deoxyguanosine-3'-phosphorothioate
  modified_base 3: mod_base = OTHER; note = 2'-O-methylguanosine-3'-phosphate
  modified_base 4: mod_base = OTHER; note = 2'-O-methyladenosine-3'-phosphate
  modified_base 6: mod_base = OTHER; note = 2'-O-methyluridine-3'-phosphate
  modified_base 8: mod_base = OTHER; note = 2'-O-methylguanosine-3'-phosphate
  modified_base 9: mod_base = OTHER; note = 2'-O-methylcytidine-3'-phosphate
  modified_base 10: mod_base = OTHER; note = 2'-O-methyluridine-3'-phosphate
  modified_base 11: mod_base = OTHER; note = 2'-O-methylguanosine-3'-phosphate
  modified_base 13: mod_base = OTHER; note = 2'-O-methyluridine-3'-phosphate
  modified_base 14: mod_base = OTHER; note = 2'-fluorouridine-3'-phosphate
  modified_base 15: mod_base = OTHER; note = 2'-O-methylguanosine-3'-phosphate
  modified_base 16: mod_base = OTHER; note = 2'-O-methylguanosine-3'-phosphate
  modified_base 17: mod_base = OTHER; note = 2'-O-methylcytidine-3'-phosphate
  modified_base 18: mod_base = OTHER; note = 2'-O-methyluridine-3'-phosphate
  modified_base 19: mod_base = OTHER; note = 2'-O-methyladenosine-3'-phosphate
  modified_base 20: mod_base = OTHER; note = 2'-O-methylguanosine-3'-phosphate
  modified_base 21: mod_base = OTHER; note = 2'-O-methylcytidine-3'-phosphorothioate
  modified_base 22: mod_base = OTHER; note = 2'-O-methyluridine-3'-phosphorothioate
  modified_base 23: mod_base = OTHER; note = 2'-O-methylcytidine-3'-phosphate
  misc_feature 1: note = RNA
  misc_feature 2: note = DNA
  misc_feature 3..4: note = RNA
  misc_feature 5: note = DNA
  misc_feature 6: note = RNA
  misc_feature 7: note = DNA
  misc_feature 8..11: note = RNA
  misc_feature 12: note = DNA
  misc_feature 13..23: note = RNA
aggatttgctgcttggctagctc

SEQ ID NO: 7330 - DNA, 23 bp, synthetic construct
  source 1..23: mol_type = other DNA
  modified_base 1: mod_base = OTHER; note = 2'-O-methyladenosine-3'-phosphorothioate
  modified_base 2: mod_base = OTHER; note = 2'-deoxyadenosine-3'-phosphorothioate
  modified_base 3: mod_base = OTHER; note = 2'-O-methylguanosine-3'-phosphate
  modified_base 4: mod_base = OTHER; note = 2'-O-methylguanosine-3'-phosphate
  modified_base 6: mod_base = OTHER; note = 2'-O-methyluridine-3'-phosphate
  modified_base 8: mod_base = OTHER; note = 2'-O-methyluridine-3'-phosphate
  modified_base 9: mod_base = OTHER; note = 2'-O-methylguanosine-3'-phosphate
  modified_base 10: mod_base = OTHER; note = 2'-O-methylcytidine-3'-phosphate
  modified_base 11: mod_base = OTHER; note = 2'-O-methyluridine-3'-phosphate
  modified_base 13: mod_base = OTHER; note = 2'-O-methylcytidine-3'-phosphate
  modified_base 14: mod_base = OTHER; note = 2'-fluorouridine-3'-phosphate
  modified_base 15: mod_base = OTHER; note = 2'-O-methyluridine-3'-phosphate
  modified_base 16: mod_base = OTHER; note = 2'-O-methylguanosine-3'-phosphate
  modified_base 17: mod_base = OTHER; note = 2'-O-methylguanosine-3'-phosphate
  modified_base 18: mod_base = OTHER; note = 2'-O-methylcytidine-3'-phosphate
  modified_base 19: mod_base = OTHER; note = 2'-O-methyluridine-3'-phosphate
  modified_base 20: mod_base = OTHER; note = 2'-O-methyladenosine-3'-phosphate
  modified_base 21: mod_base = OTHER; note = 2'-O-methylguanosine-3'-phosphorothioate
  modified_base 22: mod_base = OTHER; note = 2'-O-methylcytidine-3'-phosphorothioate
  modified_base 23: mod_base = OTHER; note = 2'-O-methyluridine-3'-phosphate
  misc_feature 1: note = RNA
  misc_feature 2: note = DNA
  misc_feature 3..4: note = RNA
  misc_feature 5: note = DNA
  misc_feature 6: note = RNA
  misc_feature 7: note = DNA
  misc_feature 8..11: note = RNA
  misc_feature 12: note = DNA
  misc_feature 13..23: note = RNA
aaggatttgctgcttggctagct

SEQ ID NO: 7331 - DNA, 23 bp, synthetic construct
  source 1..23: mol_type = other DNA
  modified_base 1: mod_base = OTHER; note = 2'-O-methyladenosine-3'-phosphorothioate
  modified_base 2: mod_base = OTHER; note = 2'-deoxycytidine-3'-phosphorothioate
  modified_base 3: mod_base = OTHER; note = 2'-O-methyladenosine-3'-phosphate
  modified_base 4: mod_base = OTHER; note = 2'-O-methylguanosine-3'-phosphate
  modified_base 6: mod_base = OTHER; note = 2'-O-methyladenosine-3'-phosphate
  modified_base 8: mod_base = OTHER; note = 2'-O-methyluridine-3'-phosphate
  modified_base 9: mod_base = OTHER; note = 2'-O-methyluridine-3'-phosphate
  modified_base 10: mod_base = OTHER; note = 2'-O-methylguanosine-3'-phosphate
  modified_base 11: mod_base = OTHER; note = 2'-O-methylcytidine-3'-phosphate
  modified_base 13: mod_base = OTHER; note = 2'-O-methylguanosine-3'-phosphate
  modified_base 14: mod_base = OTHER; note = 2'-fluorocytidine-3'-phosphate
  modified_base 15: mod_base = OTHER; note = 2'-O-methyluridine-3'-phosphate
  modified_base 16: mod_base = OTHER; note = 2'-O-methyluridine-3'-phosphate
  modified_base 17: mod_base = OTHER; note = 2'-O-methylguanosine-3'-phosphate
  modified_base 18: mod_base = OTHER; note = 2'-O-methylguanosine-3'-phosphate
  modified_base 19: mod_base = OTHER; note = 2'-O-methylcytidine-3'-phosphate
  modified_base 20: mod_base = OTHER; note = 2'-O-methyluridine-3'-phosphate
  modified_base 21: mod_base = OTHER; note = 2'-O-methyladenosine-3'-phosphorothioate
  modified_base 22: mod_base = OTHER; note = 2'-O-methylguanosine-3'-phosphorothioate
  modified_base 23: mod_base = OTHER; note = 2'-O-methylcytidine-3'-phosphate
  misc_feature 1: note = RNA
  misc_feature 2: note = DNA
  misc_feature 3..4: note = RNA
  misc_feature 5: note = DNA
  misc_feature 6: note = RNA
  misc_feature 7: note = DNA
  misc_feature 8..11: note = RNA
  misc_feature 12: note = DNA
  misc_feature 13..23: note = RNA
acaggatttgctgcttggctagc

SEQ ID NO: 7332 - DNA, 23 bp, synthetic construct
  source 1..23: mol_type = other DNA
  modified_base 1: mod_base = OTHER; note = 2'-O-methyladenosine-3'-phosphorothioate
  modified_base 2: mod_base = OTHER; note = 2'-deoxycytidine-3'-phosphorothioate
  modified_base 3: mod_base = OTHER; note = 2'-O-methylcytidine-3'-phosphate
  modified_base 4: mod_base = OTHER; note = 2'-O-methyladenosine-3'-phosphate
  modified_base 6: mod_base = OTHER; note = 2'-O-methylguanosine-3'-phosphate
  modified_base 8: mod_base = OTHER; note = 2'-O-methyluridine-3'-phosphate
  modified_base 9: mod_base = OTHER; note = 2'-O-methyluridine-3'-phosphate
  modified_base 10: mod_base = OTHER; note = 2'-O-methyluridine-3'-phosphate
  modified_base 11: mod_base = OTHER; note = 2'-O-methylguanosine-3'-phosphate
  modified_base 13: mod_base = OTHER; note = 2'-O-methyluridine-3'-phosphate
  modified_base 14: mod_base = OTHER; note = 2'-fluoroguanosine-3'-phosphate
  modified_base 15: mod_base = OTHER; note = 2'-O-methylcytidine-3'-phosphate
  modified_base 16: mod_base = OTHER; note = 2'-O-methyluridine-3'-phosphate
  modified_base 17: mod_base = OTHER; note = 2'-O-methyluridine-3'-phosphate
  modified_base 18: mod_base = OTHER; note = 2'-O-methylguanosine-3'-phosphate
  modified_base 19: mod_base = OTHER; note = 2'-O-methylguanosine-3'-phosphate
  modified_base 20: mod_base = OTHER; note = 2'-O-methylcytidine-3'-phosphate
  modified_base 21: mod_base = OTHER; note = 2'-O-methyluridine-3'-phosphorothioate
  modified_base 22: mod_base = OTHER; note = 2'-O-methyladenosine-3'-phosphorothioate
  modified_base 23: mod_base = OTHER; note = 2'-O-methylguanosine-3'-phosphate
  misc_feature 1: note = RNA
  misc_feature 2: note = DNA
  misc_feature 3..4: note = RNA
  misc_feature 5: note = DNA
  misc_feature 6: note = RNA
  misc_feature 7: note = DNA
  misc_feature 8..11: note = RNA
  misc_feature 12: note = DNA
  misc_feature 13..23: note = RNA
accaggatttgctgcttggctag

SEQ ID NO: 7333 - DNA, 23 bp, synthetic construct
  source 1..23: mol_type = other DNA
  modified_base 1: mod_base = OTHER; note = 2'-O-methyladenosine-3'-phosphorothioate
  modified_base 2: mod_base = OTHER; note = 2'-deoxythimidine-3'-phosphorothioate
  modified_base 3: mod_base = OTHER; note = 2'-O-methylcytidine-3'-phosphate
  modified_base 4: mod_base = OTHER; note = 2'-O-methylcytidine-3'-phosphate
  modified_base 6: mod_base = OTHER; note = 2'-O-methylguanosine-3'-phosphate
  modified_base 8: mod_base = OTHER; note = 2'-O-methyladenosine-3'-phosphate
  modified_base 9: mod_base = OTHER; note = 2'-O-methyluridine-3'-phosphate
  modified_base 10: mod_base = OTHER; note = 2'-O-methyluridine-3'-phosphate
  modified_base 11: mod_base = OTHER; note = 2'-O-methyluridine-3'-phosphate
  modified_base 13: mod_base = OTHER; note = 2'-O-methylcytidine-3'-phosphate
  modified_base 14: mod_base = OTHER; note = 2'-fluorouridine-3'-phosphate
  modified_base 15: mod_base = OTHER; note = 2'-O-methylguanosine-3'-phosphate
  modified_base 16: mod_base = OTHER; note = 2'-O-methylcytidine-3'-phosphate
  modified_base 17: mod_base = OTHER; note = 2'-O-methyluridine-3'-phosphate
  modified_base 18: mod_base = OTHER; note = 2'-O-methyluridine-3'-phosphate
  modified_base 19: mod_base = OTHER; note = 2'-O-methylguanosine-3'-phosphate
  modified_base 20: mod_base = OTHER; note = 2'-O-methylguanosine-3'-phosphate
  modified_base 21: mod_base = OTHER; note = 2'-O-methylcytidine-3'-phosphorothioate
  modified_base 22: mod_base = OTHER; note = 2'-O-methyluridine-3'-phosphorothioate
  modified_base 23: mod_base = OTHER; note = 2'-O-methyladenosine-3'-phosphate
  misc_feature 1: note = RNA
  misc_feature 2: note = DNA
  misc_feature 3..4: note = RNA
  misc_feature 5: note = DNA
  misc_feature 6: note = RNA
  misc_feature 7: note = DNA
  misc_feature 8..11: note = RNA
  misc_feature 12: note = DNA
  misc_feature 13..23: note = RNA
atccaggatttgctgcttggcta

SEQ ID NO: 7334 - DNA, 23 bp, synthetic construct
  source 1..23: mol_type = other DNA
  modified_base 1: mod_base = OTHER; note = 2'-O-methyladenosine-3'-phosphorothioate
  modified_base 2: mod_base = OTHER; note = 2'-deoxythimidine-3'-phosphorothioate
  modified_base 3: mod_base = OTHER; note = 2'-O-methylcytidine-3'-phosphate
  modified_base 4: mod_base = OTHER; note = 2'-O-methyluridine-3'-phosphate
  modified_base 6: mod_base = OTHER; note = 2'-O-methylguanosine-3'-phosphate
  modified_base 8: mod_base = OTHER; note = 2'-O-methyladenosine-3'-phosphate
  modified_base 9: mod_base = OTHER; note = 2'-O-methylcytidine-3'-phosphate
  modified_base 10: mod_base = OTHER; note = 2'-O-methylguanosine-3'-phosphate
  modified_base 11: mod_base = OTHER; note = 2'-O-methyladenosine-3'-phosphate
  modified_base 13: mod_base = OTHER; note = 2'-O-methyluridine-3'-phosphate
  modified_base 14: mod_base = OTHER; note = 2'-fluoroguanosine-3'-phosphate
  modified_base 15: mod_base = OTHER; note = 2'-O-methylguanosine-3'-phosphate
  modified_base 16: mod_base = OTHER; note = 2'-O-methyluridine-3'-phosphate
  modified_base 17: mod_base = OTHER; note = 2'-O-methylcytidine-3'-phosphate
  modified_base 18: mod_base = OTHER; note = 2'-O-methyladenosine-3'-phosphate
  modified_base 19: mod_base = OTHER; note = 2'-O-methylguanosine-3'-phosphate
  modified_base 20: mod_base = OTHER; note = 2'-O-methylguanosine-3'-phosphate
  modified_base 21: mod_base = OTHER; note = 2'-O-methyluridine-3'-phosphorothioate
  modified_base 22: mod_base = OTHER; note = 2'-O-methylguanosine-3'-phosphorothioate
  modified_base 23: mod_base = OTHER; note = 2'-O-methylcytidine-3'-phosphate
  misc_feature 1: note = RNA
  misc_feature 2: note = DNA
  misc_feature 3..4: note = RNA
  misc_feature 5: note = DNA
  misc_feature 6: note = RNA
  misc_feature 7: note = DNA
  misc_feature 8..11: note = RNA
  misc_feature 12: note = DNA
  misc_feature 13..23: note = RNA
atctgggacgactggtcaggtgc

SEQ ID NO: 7335 - DNA, 23 bp, synthetic construct
  source 1..23: mol_type = other DNA
  modified_base 1: mod_base = OTHER; note = 2'-O-methyladenosine-3'-phosphorothioate
  modified_base 2: mod_base = OTHER; note = 2'-deoxythimidine-3'-phosphorothioate
  modified_base 3: mod_base = OTHER; note = 2'-O-methyluridine-3'-phosphate
  modified_base 4: mod_base = OTHER; note = 2'-O-methylcytidine-3'-phosphate
  modified_base 6: mod_base = OTHER; note = 2'-O-methylguanosine-3'-phosphate
  modified_base 8: mod_base = OTHER; note = 2'-O-methylguanosine-3'-phosphate
  modified_base 9: mod_base = OTHER; note = 2'-O-methyladenosine-3'-phosphate
  modified_base 10: mod_base = OTHER; note = 2'-O-methylcytidine-3'-phosphate
  modified_base 11: mod_base = OTHER; note = 2'-O-methylguanosine-3'-phosphate
  modified_base 13: mod_base = OTHER; note = 2'-O-methylcytidine-3'-phosphate
  modified_base 14: mod_base = OTHER; note = 2'-fluorouridine-3'-phosphate
  modified_base 15: mod_base = OTHER; note = 2'-O-methylguanosine-3'-phosphate
  modified_base 16: mod_base = OTHER; note = 2'-O-methylguanosine-3'-phosphate
  modified_base 17: mod_base = OTHER; note = 2'-O-methyluridine-3'-phosphate
  modified_base 18: mod_base = OTHER; note = 2'-O-methylcytidine-3'-phosphate
  modified_base 19: mod_base = OTHER; note = 2'-O-methyladenosine-3'-phosphate
  modified_base 20: mod_base = OTHER; note = 2'-O-methylguanosine-3'-phosphate
  modified_base 21: mod_base = OTHER; note = 2'-O-methylguanosine-3'-phosphorothioate
  modified_base 22: mod_base = OTHER; note = 2'-O-methyluridine-3'-phosphorothioate
  modified_base 23: mod_base = OTHER; note = 2'-O-methylguanosine-3'-phosphate
  misc_feature 1: note = RNA
  misc_feature 2: note = DNA
  misc_feature 3..4: note = RNA
  misc_feature 5: note = DNA
  misc_feature 6: note = RNA
  misc_feature 7: note = DNA
  misc_feature 8..11: note = RNA
  misc_feature 12: note = DNA
  misc_feature 13..23: note = RNA
attctgggacgactggtcaggtg

SEQ ID NO: 7336 - DNA, 23 bp, synthetic construct
  source 1..23: mol_type = other DNA
  modified_base 1: mod_base = OTHER; note = 2'-O-methyladenosine-3'-phosphorothioate
  modified_base 2: mod_base = OTHER; note = 2'-deoxyadenosine-3'-phosphorothioate
  modified_base 3: mod_base = OTHER; note = 2'-O-methyluridine-3'-phosphate
  modified_base 4: mod_base = OTHER; note = 2'-O-methyluridine-3'-phosphate
  modified_base 6: mod_base = OTHER; note = 2'-O-methyluridine-3'-phosphate
  modified_base 8: mod_base = OTHER; note = 2'-O-methylguanosine-3'-phosphate
  modified_base 9: mod_base = OTHER; note = 2'-O-methylguanosine-3'-phosphate
  modified_base 10: mod_base = OTHER; note = 2'-O-methyladenosine-3'-phosphate
  modified_base 11: mod_base = OTHER; note = 2'-O-methylcytidine-3'-phosphate
  modified_base 13: mod_base = OTHER; note = 2'-O-methyladenosine-3'-phosphate
  modified_base 14: mod_base = OTHER; note = 2'-fluorocytidine-3'-phosphate
  modified_base 15: mod_base = OTHER; note = 2'-O-methyluridine-3'-phosphate
  modified_base 16: mod_base = OTHER; note = 2'-O-methylguanosine-3'-phosphate
  modified_base 17: mod_base = OTHER; note = 2'-O-methylguanosine-3'-phosphate
  modified_base 18: mod_base = OTHER; note = 2'-O-methyluridine-3'-phosphate
  modified_base 19: mod_base = OTHER; note = 2'-O-methylcytidine-3'-phosphate
  modified_base 20: mod_base = OTHER; note = 2'-O-methyladenosine-3'-phosphate
  modified_base 21: mod_base = OTHER; note = 2'-O-methylguanosine-3'-phosphorothioate
  modified_base 22: mod_base = OTHER; note = 2'-O-methylguanosine-3'-phosphorothioate
  modified_base 23: mod_base = OTHER; note = 2'-O-methyluridine-3'-phosphate
  misc_feature 1: note = RNA
  misc_feature 2: note = DNA
  misc_feature 3..4: note = RNA
  misc_feature 5: note = DNA
  misc_feature 6: note = RNA
  misc_feature 7: note = DNA
  misc_feature 8..11: note = RNA
  misc_feature 12: note = DNA
  misc_feature 13..23: note = RNA
aattctgggacgactggtcaggt

SEQ ID NO: 7337 - DNA, 23 bp, synthetic construct
  source 1..23: mol_type = other DNA
  modified_base 1: mod_base = OTHER; note = 2'-O-methyladenosine-3'-phosphorothioate
  modified_base 2: mod_base = OTHER; note = 2'-deoxythimidine-3'-phosphorothioate
  modified_base 3: mod_base = OTHER; note = 2'-O-methyladenosine-3'-phosphate
  modified_base 4: mod_base = OTHER; note = 2'-O-methyluridine-3'-phosphate
  modified_base 6: mod_base = OTHER; note = 2'-O-methylcytidine-3'-phosphate
  modified_base 8: mod_base = OTHER; note = 2'-O-methylguanosine-3'-phosphate
  modified_base 9: mod_base = OTHER; note = 2'-O-methylguanosine-3'-phosphate
  modified_base 10: mod_base = OTHER; note = 2'-O-methylguanosine-3'-phosphate
  modified_base 11: mod_base = OTHER; note = 2'-O-methyladenosine-3'-phosphate
  modified_base 13: mod_base = OTHER; note = 2'-O-methylguanosine-3'-phosphate
  modified_base 14: mod_base = OTHER; note = 2'-fluoroadenosine-3'-phosphate
  modified_base 15: mod_base = OTHER; note = 2'-O-methylcytidine-3'-phosphate
  modified_base 16: mod_base = OTHER; note = 2'-O-methyluridine-3'-phosphate
  modified_base 17: mod_base = OTHER; note = 2'-O-methylguanosine-3'-phosphate
  modified_base 18: mod_base = OTHER; note = 2'-O-methylguanosine-3'-phosphate
  modified_base 19: mod_base = OTHER; note = 2'-O-methyluridine-3'-phosphate
  modified_base 20: mod_base = OTHER; note = 2'-O-methylcytidine-3'-phosphate
  modified_base 21: mod_base = OTHER; note = 2'-O-methyladenosine-3'-phosphorothioate
  modified_base 22: mod_base = OTHER; note = 2'-O-methylguanosine-3'-phosphorothioate
  modified_base 23: mod_base = OTHER; note = 2'-O-methylguanosine-3'-phosphate
  misc_feature 1: note = RNA
  misc_feature 2: note = DNA
  misc_feature 3..4: note = RNA
  misc_feature 5: note = DNA
  misc_feature 6: note = RNA
  misc_feature 7: note = DNA
  misc_feature 8..11: note = RNA
  misc_feature 12: note = DNA
  misc_feature 13..23: note = RNA
atattctgggacgactggtcagg

SEQ ID NO: 7338 - DNA, 23 bp, synthetic construct
  source 1..23: mol_type = other DNA
  modified_base 1: mod_base = OTHER; note = 2'-O-methyladenosine-3'-phosphorothioate
  modified_base 2: mod_base = OTHER; note = 2'-deoxythimidine-3'-phosphorothioate
  modified_base 3: mod_base = OTHER; note = 2'-O-methyluridine-3'-phosphate
  modified_base 4: mod_base = OTHER; note = 2'-O-methyladenosine-3'-phosphate
  modified_base 6: mod_base = OTHER; note = 2'-O-methyluridine-3'-phosphate
  modified_base 8: mod_base = OTHER; note = 2'-O-methyluridine-3'-phosphate
  modified_base 9: mod_base = OTHER; note = 2'-O-methylguanosine-3'-phosphate
  modified_base 10: mod_base = OTHER; note = 2'-O-methylguanosine-3'-phosphate
  modified_base 11: mod_base = OTHER; note = 2'-O-methylguanosine-3'-phosphate
  modified_base 13: mod_base = OTHER; note = 2'-O-methylcytidine-3'-phosphate
  modified_base 14: mod_base = OTHER; note = 2'-fluoroguanosine-3'-phosphate
  modified_base 15: mod_base = OTHER; note = 2'-O-methyladenosine-3'-phosphate
  modified_base 16: mod_base = OTHER; note = 2'-O-methylcytidine-3'-phosphate
  modified_base 17: mod_base = OTHER; note = 2'-O-methyluridine-3'-phosphate
  modified_base 18: mod_base = OTHER; note = 2'-O-methylguanosine-3'-phosphate
  modified_base 19: mod_base = OTHER; note = 2'-O-methylguanosine-3'-phosphate
  modified_base 20: mod_base = OTHER; note = 2'-O-methyluridine-3'-phosphate
  modified_base 21: mod_base = OTHER; note = 2'-O-methylcytidine-3'-phosphorothioate
  modified_base 22: mod_base = OTHER; note = 2'-O-methyladenosine-3'-phosphorothioate
  modified_base 23: mod_base = OTHER; note = 2'-O-methylguanosine-3'-phosphate
  misc_feature 1: note = RNA
  misc_feature 2: note = DNA
  misc_feature 3..4: note = RNA
  misc_feature 5: note = DNA
  misc_feature 6: note = RNA
  misc_feature 7: note = DNA
  misc_feature 8..11: note = RNA
  misc_feature 12: note = DNA
  misc_feature 13..23: note = RNA
attattctgggacgactggtcag

SEQ ID NO: 7339 - DNA, 23 bp, synthetic construct
  source 1..23: mol_type = other DNA
  modified_base 1: mod_base = OTHER; note = 2'-O-methyladenosine-3'-phosphorothioate
  modified_base 2: mod_base = OTHER; note = 2'-deoxyadenosine-3'-phosphorothioate
  modified_base 3: mod_base = OTHER; note = 2'-O-methylguanosine-3'-phosphate
  modified_base 4: mod_base = OTHER; note = 2'-O-methyluridine-3'-phosphate
  modified_base 6: mod_base = OTHER; note = 2'-O-methyladenosine-3'-phosphate
  modified_base 8: mod_base = OTHER; note = 2'-O-methyluridine-3'-phosphate
  modified_base 9: mod_base = OTHER; note = 2'-O-methylcytidine-3'-phosphate
  modified_base 10: mod_base = OTHER; note = 2'-O-methyluridine-3'-phosphate
  modified_base 11: mod_base = OTHER; note = 2'-O-methylguanosine-3'-phosphate
  modified_base 13: mod_base = OTHER; note = 2'-O-methylguanosine-3'-phosphate
  modified_base 14: mod_base = OTHER; note = 2'-fluoroadenosine-3'-phosphate
  modified_base 15: mod_base = OTHER; note = 2'-O-methylcytidine-3'-phosphate
  modified_base 16: mod_base = OTHER; note = 2'-O-methylguanosine-3'-phosphate
  modified_base 17: mod_base = OTHER; note = 2'-O-methyladenosine-3'-phosphate
  modified_base 18: mod_base = OTHER; note = 2'-O-methylcytidine-3'-phosphate
  modified_base 19: mod_base = OTHER; note = 2'-O-methyluridine-3'-phosphate
  modified_base 20: mod_base = OTHER; note = 2'-O-methylguanosine-3'-phosphate
  modified_base 21: mod_base = OTHER; note = 2'-O-methylguanosine-3'-phosphorothioate
  modified_base 22: mod_base = OTHER; note = 2'-O-methyluridine-3'-phosphorothioate
  modified_base 23: mod_base = OTHER; note = 2'-O-methylcytidine-3'-phosphate
  misc_feature 1: note = RNA
  misc_feature 2: note = DNA
  misc_feature 3..4: note = RNA
  misc_feature 5: note = DNA
  misc_feature 6: note = RNA
  misc_feature 7: note = DNA
  misc_feature 8..11: note = RNA
  misc_feature 12: note = DNA
  misc_feature 13..23: note = RNA
aagttattctgggacgactggtc

SEQ ID NO: 7340 - DNA, 23 bp, synthetic construct
  source 1..23: mol_type = other DNA
  modified_base 1: mod_base = OTHER; note = 2'-O-methyladenosine-3'-phosphorothioate
  modified_base 2: mod_base = OTHER; note = 2'-deoxyguanosine-3'-phosphorothioate
  modified_base 3: mod_base = OTHER; note = 2'-O-methyladenosine-3'-phosphate
  modified_base 4: mod_base = OTHER; note = 2'-O-methylguanosine-3'-phosphate
  modified_base 6: mod_base = OTHER; note = 2'-O-methyluridine-3'-phosphate
  modified_base 8: mod_base = OTHER; note = 2'-O-methyluridine-3'-phosphate
  modified_base 9: mod_base = OTHER; note = 2'-O-methyluridine-3'-phosphate
  modified_base 10: mod_base = OTHER; note = 2'-O-methylcytidine-3'-phosphate
  modified_base 11: mod_base = OTHER; note = 2'-O-methyluridine-3'-phosphate
  modified_base 13: mod_base = OTHER; note = 2'-O-methylguanosine-3'-phosphate
  modified_base 14: mod_base = OTHER; note = 2'-fluoroguanosine-3'-phosphate
  modified_base 15: mod_base = OTHER; note = 2'-O-methyladenosine-3'-phosphate
  modified_base 16: mod_base = OTHER; note = 2'-O-methylcytidine-3'-phosphate
  modified_base 17: mod_base = OTHER; note = 2'-O-methylguanosine-3'-phosphate
  modified_base 18: mod_base = OTHER; note = 2'-O-methyladenosine-3'-phosphate
  modified_base 19: mod_base = OTHER; note = 2'-O-methylcytidine-3'-phosphate
  modified_base 20: mod_base = OTHER; note = 2'-O-methyluridine-3'-phosphate
  modified_base 21: mod_base = OTHER; note = 2'-O-methylguanosine-3'-phosphorothioate
  modified_base 22: mod_base = OTHER; note = 2'-O-methylguanosine-3'-phosphorothioate
  modified_base 23: mod_base = OTHER; note = 2'-O-methyluridine-3'-phosphate
  misc_feature 1: note = RNA
  misc_feature 2: note = DNA
  misc_feature 3..4: note = RNA
  misc_feature 5: note = DNA
  misc_feature 6: note = RNA
  misc_feature 7: note = DNA
  misc_feature 8..11: note = RNA
  misc_feature 12: note = DNA
  misc_feature 13..23: note = RNA
agagttattctgggacgactggt

SEQ ID NO: 7341 - DNA, 23 bp, synthetic construct
  source 1..23: mol_type = other DNA
  modified_base 1: mod_base = OTHER; note = 2'-O-methyladenosine-3'-phosphorothioate
  modified_base 2: mod_base = OTHER; note = 2'-deoxythimidine-3'-phosphorothioate
  modified_base 3: mod_base = OTHER; note = 2'-O-methylguanosine-3'-phosphate
  modified_base 4: mod_base = OTHER; note = 2'-O-methyladenosine-3'-phosphate
  modified_base 6: mod_base = OTHER; note = 2'-O-methyluridine-3'-phosphate
  modified_base 8: mod_base = OTHER; note = 2'-O-methyladenosine-3'-phosphate
  modified_base 9: mod_base = OTHER; note = 2'-O-methyluridine-3'-phosphate
  modified_base 10: mod_base = OTHER; note = 2'-O-methyluridine-3'-phosphate
  modified_base 11: mod_base = OTHER; note = 2'-O-methylcytidine-3'-phosphate
  modified_base 13: mod_base = OTHER; note = 2'-O-methylguanosine-3'-phosphate
  modified_base 14: mod_base = OTHER; note = 2'-fluoroguanosine-3'-phosphate
  modified_base 15: mod_base = OTHER; note = 2'-O-methylguanosine-3'-phosphate
  modified_base 16: mod_base = OTHER; note = 2'-O-methyladenosine-3'-phosphate
  modified_base 17: mod_base = OTHER; note = 2'-O-methylcytidine-3'-phosphate
  modified_base 18: mod_base = OTHER; note = 2'-O-methylguanosine-3'-phosphate
  modified_base 19: mod_base = OTHER; note = 2'-O-methyladenosine-3'-phosphate
  modified_base 20: mod_base = OTHER; note = 2'-O-methylcytidine-3'-phosphate
  modified_base 21: mod_base = OTHER; note = 2'-O-methyluridine-3'-phosphorothioate
  modified_base 22: mod_base = OTHER; note = 2'-O-methylguanosine-3'-phosphorothioate
  modified_base 23: mod_base = OTHER; note = 2'-O-methylguanosine-3'-phosphate
  misc_feature 1: note = RNA
  misc_feature 2: note = DNA
  misc_feature 3..4: note = RNA
  misc_feature 5: note = DNA
  misc_feature 6: note = RNA
  misc_feature 7: note = DNA
  misc_feature 8..11: note = RNA
  misc_feature 12: note = DNA
  misc_feature 13..23: note = RNA
atgagttattctgggacgactgg

SEQ ID NO: 7342 - DNA, 23 bp, synthetic construct
  source 1..23: mol_type = other DNA
  modified_base 1: mod_base = OTHER; note = 2'-O-methyladenosine-3'-phosphorothioate
  modified_base 2: mod_base = OTHER; note = 2'-deoxyadenosine-3'-phosphorothioate
  modified_base 3: mod_base = OTHER; note = 2'-O-methyluridine-3'-phosphate
  modified_base 4: mod_base = OTHER; note = 2'-O-methylguanosine-3'-phosphate
  modified_base 6: mod_base = OTHER; note = 2'-O-methylguanosine-3'-phosphate
  modified_base 8: mod_base = OTHER; note = 2'-O-methyluridine-3'-phosphate
  modified_base 9: mod_base = OTHER; note = 2'-O-methyladenosine-3'-phosphate
  modified_base 10: mod_base = OTHER; note = 2'-O-methyluridine-3'-phosphate
  modified_base 11: mod_base = OTHER; note = 2'-O-methyluridine-3'-phosphate
  modified_base 13: mod_base = OTHER; note = 2'-O-methyluridine-3'-phosphate
  modified_base 14: mod_base = OTHER; note = 2'-fluoroguanosine-3'-phosphate
  modified_base 15: mod_base = OTHER; note = 2'-O-methylguanosine-3'-phosphate
  modified_base 16: mod_base = OTHER; note = 2'-O-methylguanosine-3'-phosphate
  modified_base 17: mod_base = OTHER; note = 2'-O-methyladenosine-3'-phosphate
  modified_base 18: mod_base = OTHER; note = 2'-O-methylcytidine-3'-phosphate
  modified_base 19: mod_base = OTHER; note = 2'-O-methylguanosine-3'-phosphate
  modified_base 20: mod_base = OTHER; note = 2'-O-methyladenosine-3'-phosphate
  modified_base 21: mod_base = OTHER; note = 2'-O-methylcytidine-3'-phosphorothioate
  modified_base 22: mod_base = OTHER; note = 2'-O-methyluridine-3'-phosphorothioate
  modified_base 23: mod_base = OTHER; note = 2'-O-methylguanosine-3'-phosphate
  misc_feature 1: note = RNA
  misc_feature 2: note = DNA
  misc_feature 3..4: note = RNA
  misc_feature 5: note = DNA
  misc_feature 6: note = RNA
  misc_feature 7: note = DNA
  misc_feature 8..11: note = RNA
  misc_feature 12: note = DNA
  misc_feature 13..23: note = RNA
aatgagttattctgggacgactg

SEQ ID NO: 7343 - DNA, 23 bp, synthetic construct
  source 1..23: mol_type = other DNA
  modified_base 1: mod_base = OTHER; note = 2'-O-methyladenosine-3'-phosphorothioate
  modified_base 2: mod_base = OTHER; note = 2'-deoxyguanosine-3'-phosphorothioate
  modified_base 3: mod_base = OTHER; note = 2'-O-methyladenosine-3'-phosphate
  modified_base 4: mod_base = OTHER; note = 2'-O-methyluridine-3'-phosphate
  modified_base 6: mod_base = OTHER; note = 2'-O-methyladenosine-3'-phosphate
  modified_base 8: mod_base = OTHER; note = 2'-O-methyluridine-3'-phosphate
  modified_base 9: mod_base = OTHER; note = 2'-O-methyluridine-3'-phosphate
  modified_base 10: mod_base = OTHER; note = 2'-O-methyladenosine-3'-phosphate
  modified_base 11: mod_base = OTHER; note = 2'-O-methyluridine-3'-phosphate
  modified_base 13: mod_base = OTHER; note = 2'-O-methylcytidine-3'-phosphate
  modified_base 14: mod_base = OTHER; note = 2'-fluorouridine-3'-phosphate
  modified_base 15: mod_base = OTHER; note = 2'-O-methylguanosine-3'-phosphate
  modified_base 16: mod_base = OTHER; note = 2'-O-methylguanosine-3'-phosphate
  modified_base 17: mod_base = OTHER; note = 2'-O-methylguanosine-3'-phosphate
  modified_base 18: mod_base = OTHER; note = 2'-O-methyladenosine-3'-phosphate
  modified_base 19: mod_base = OTHER; note = 2'-O-methylcytidine-3'-phosphate
  modified_base 20: mod_base = OTHER; note = 2'-O-methylguanosine-3'-phosphate
  modified_base 21: mod_base = OTHER; note = 2'-O-methyladenosine-3'-phosphorothioate
  modified_base 22: mod_base = OTHER; note = 2'-O-methylcytidine-3'-phosphorothioate
  modified_base 23: mod_base = OTHER; note = 2'-O-methyluridine-3'-phosphate
  misc_feature 1: note = RNA
  misc_feature 2: note = DNA
  misc_feature 3..4: note = RNA
  misc_feature 5: note = DNA
  misc_feature 6: note = RNA
  misc_feature 7: note = DNA
  misc_feature 8..11: note = RNA
  misc_feature 12: note = DNA
  misc_feature 13..23: note = RNA
agatgagttattctgggacgact

SEQ ID NO: 7344 - DNA, 23 bp, synthetic construct
  source 1..23: mol_type = other DNA
  modified_base 1: mod_base = OTHER; note = 2'-O-methyladenosine-3'-phosphorothioate
  modified_base 2: mod_base = OTHER; note = 2'-deoxyguanosine-3'-phosphorothioate
  modified_base 3: mod_base = OTHER; note = 2'-O-methylguanosine-3'-phosphate
  modified_base 4: mod_base = OTHER; note = 2'-O-methyladenosine-3'-phosphate
  modified_base 6: mod_base = OTHER; note = 2'-O-methylguanosine-3'-phosphate
  modified_base 8: mod_base = OTHER; note = 2'-O-methylguanosine-3'-phosphate
  modified_base 9: mod_base = OTHER; note = 2'-O-methyluridine-3'-phosphate
  modified_base 10: mod_base = OTHER; note = 2'-O-methyluridine-3'-phosphate
  modified_base 11: mod_base = OTHER; note = 2'-O-methyladenosine-3'-phosphate
  modified_base 13: mod_base = OTHER; note = 2'-O-methyluridine-3'-phosphate
  modified_base 14: mod_base = OTHER; note = 2'-fluorocytidine-3'-phosphate
  modified_base 15: mod_base = OTHER; note = 2'-O-methyluridine-3'-phosphate
  modified_base 16: mod_base = OTHER; note = 2'-O-methylguanosine-3'-phosphate
  modified_base 17: mod_base = OTHER; note = 2'-O-methylguanosine-3'-phosphate
  modified_base 18: mod_base = OTHER; note = 2'-O-methylguanosine-3'-phosphate
  modified_base 19: mod_base = OTHER; note = 2'-O-methyladenosine-3'-phosphate
  modified_base 20: mod_base = OTHER; note = 2'-O-methylcytidine-3'-phosphate
  modified_base 21: mod_base = OTHER; note = 2'-O-methylguanosine-3'-phosphorothioate
  modified_base 22: mod_base = OTHER; note = 2'-O-methyladenosine-3'-phosphorothioate
  modified_base 23: mod_base = OTHER; note = 2'-O-methylcytidine-3'-phosphate
  misc_feature 1: note = RNA
  misc_feature 2: note = DNA
  misc_feature 3..4: note = RNA
  misc_feature 5: note = DNA
  misc_feature 6: note = RNA
  misc_feature 7: note = DNA
  misc_feature 8..11: note = RNA
  misc_feature 12: note = DNA
  misc_feature 13..23: note = RNA
aggatgagttattctgggacgac

SEQ ID NO: 7345 - DNA, 23 bp, synthetic construct
  source 1..23: mol_type = other DNA
  modified_base 1: mod_base = OTHER; note = 2'-O-methyladenosine-3'-phosphorothioate
  modified_base 2: mod_base = OTHER; note = 2'-deoxyadenosine-3'-phosphorothioate
  modified_base 3: mod_base = OTHER; note = 2'-O-methylguanosine-3'-phosphate
  modified_base 4: mod_base = OTHER; note = 2'-O-methylguanosine-3'-phosphate
  modified_base 6: mod_base = OTHER; note = 2'-O-methyluridine-3'-phosphate
  modified_base 8: mod_base = OTHER; note = 2'-O-methyladenosine-3'-phosphate
  modified_base 9: mod_base = OTHER; note = 2'-O-methylguanosine-3'-phosphate
  modified_base 10: mod_base = OTHER; note = 2'-O-methyluridine-3'-phosphate
  modified_base 11: mod_base = OTHER; note = 2'-O-methyluridine-3'-phosphate
  modified_base 13: mod_base = OTHER; note = 2'-O-methyluridine-3'-phosphate
  modified_base 14: mod_base = OTHER; note = 2'-fluorouridine-3'-phosphate
  modified_base 15: mod_base = OTHER; note = 2'-O-methylcytidine-3'-phosphate
  modified_base 16: mod_base = OTHER; note = 2'-O-methyluridine-3'-phosphate
  modified_base 17: mod_base = OTHER; note = 2'-O-methylguanosine-3'-phosphate
  modified_base 18: mod_base = OTHER; note = 2'-O-methylguanosine-3'-phosphate
  modified_base 19: mod_base = OTHER; note = 2'-O-methylguanosine-3'-phosphate
  modified_base 20: mod_base = OTHER; note = 2'-O-methyladenosine-3'-phosphate
  modified_base 21: mod_base = OTHER; note = 2'-O-methylcytidine-3'-phosphorothioate
  modified_base 22: mod_base = OTHER; note = 2'-O-methylguanosine-3'-phosphorothioate
  modified_base 23: mod_base = OTHER; note = 2'-O-methyladenosine-3'-phosphate
  misc_feature 1: note = RNA
  misc_feature 2: note = DNA
  misc_feature 3..4: note = RNA
  misc_feature 5: note = DNA
  misc_feature 6: note = RNA
  misc_feature 7: note = DNA
  misc_feature 8..11: note = RNA
  misc_feature 12: note = DNA
  misc_feature 13..23: note = RNA
aaggatgagttattctgggacga

SEQ ID NO: 7346 - DNA, 23 bp, synthetic construct
  source 1..23: mol_type = other DNA
  modified_base 1: mod_base = OTHER; note = 2'-O-methyladenosine-3'-phosphorothioate
  modified_base 2: mod_base = OTHER; note = 2'-deoxyguanosine-3'-phosphorothioate
  modified_base 3: mod_base = OTHER; note = 2'-O-methyladenosine-3'-phosphate
  modified_base 4: mod_base = OTHER; note = 2'-O-methylguanosine-3'-phosphate
  modified_base 6: mod_base = OTHER; note = 2'-O-methyladenosine-3'-phosphate
  modified_base 8: mod_base = OTHER; note = 2'-O-methylguanosine-3'-phosphate
  modified_base 9: mod_base = OTHER; note = 2'-O-methyladenosine-3'-phosphate
  modified_base 10: mod_base = OTHER; note = 2'-O-methylguanosine-3'-phosphate
  modified_base 11: mod_base = OTHER; note = 2'-O-methyluridine-3'-phosphate
  modified_base 13: mod_base = OTHER; note = 2'-O-methyladenosine-3'-phosphate
  modified_base 14: mod_base = OTHER; note = 2'-fluorouridine-3'-phosphate
  modified_base 15: mod_base = OTHER; note = 2'-O-methyluridine-3'-phosphate
  modified_base 16: mod_base = OTHER; note = 2'-O-methylcytidine-3'-phosphate
  modified_base 17: mod_base = OTHER; note = 2'-O-methyluridine-3'-phosphate
  modified_base 18: mod_base = OTHER; note = 2'-O-methylguanosine-3'-phosphate
  modified_base 19: mod_base = OTHER; note = 2'-O-methylguanosine-3'-phosphate
  modified_base 20: mod_base = OTHER; note = 2'-O-methylguanosine-3'-phosphate
  modified_base 21: mod_base = OTHER; note = 2'-O-methyladenosine-3'-phosphorothioate
  modified_base 22: mod_base = OTHER; note = 2'-O-methylcytidine-3'-phosphorothioate
  modified_base 23: mod_base = OTHER; note = 2'-O-methylguanosine-3'-phosphate
  misc_feature 1: note = RNA
  misc_feature 2: note = DNA
  misc_feature 3..4: note = RNA
  misc_feature 5: note = DNA
  misc_feature 6: note = RNA
  misc_feature 7: note = DNA
  misc_feature 8..11: note = RNA
  misc_feature 12: note = DNA
  misc_feature 13..23: note = RNA
agaggatgagttattctgggacg

SEQ ID NO: 7347 - DNA, 23 bp, synthetic construct
  source 1..23: mol_type = other DNA
  modified_base 1: mod_base = OTHER; note = 2'-O-methyladenosine-3'-phosphorothioate
  modified_base 2: mod_base = OTHER; note = 2'-deoxyguanosine-3'-phosphorothioate
  modified_base 3: mod_base = OTHER; note = 2'-O-methylguanosine-3'-phosphate
  modified_base 4: mod_base = OTHER; note = 2'-O-methyladenosine-3'-phosphate
  modified_base 6: mod_base = OTHER; note = 2'-O-methylguanosine-3'-phosphate
  modified_base 8: mod_base = OTHER; note = 2'-O-methyluridine-3'-phosphate
  modified_base 9: mod_base = OTHER; note = 2'-O-methylguanosine-3'-phosphate
  modified_base 10: mod_base = OTHER; note = 2'-O-methyladenosine-3'-phosphate
  modified_base 11: mod_base = OTHER; note = 2'-O-methylguanosine-3'-phosphate
  modified_base 13: mod_base = OTHER; note = 2'-O-methyluridine-3'-phosphate
  modified_base 14: mod_base = OTHER; note = 2'-fluoroadenosine-3'-phosphate
  modified_base 15: mod_base = OTHER; note = 2'-O-methyluridine-3'-phosphate
  modified_base 16: mod_base = OTHER; note = 2'-O-methyluridine-3'-phosphate
  modified_base 17: mod_base = OTHER; note = 2'-O-methylcytidine-3'-phosphate
  modified_base 18: mod_base = OTHER; note = 2'-O-methyluridine-3'-phosphate
  modified_base 19: mod_base = OTHER; note = 2'-O-methylguanosine-3'-phosphate
  modified_base 20: mod_base = OTHER; note = 2'-O-methylguanosine-3'-phosphate
  modified_base 21: mod_base = OTHER; note = 2'-O-methylguanosine-3'-phosphorothioate
  modified_base 22: mod_base = OTHER; note = 2'-O-methyladenosine-3'-phosphorothioate
  modified_base 23: mod_base = OTHER; note = 2'-O-methylcytidine-3'-phosphate
  misc_feature 1: note = RNA
  misc_feature 2: note = DNA
  misc_feature 3..4: note = RNA
  misc_feature 5: note = DNA
  misc_feature 6: note = RNA
  misc_feature 7: note = DNA
  misc_feature 8..11: note = RNA
  misc_feature 12: note = DNA
  misc_feature 13..23: note = RNA
aggaggatgagttattctgggac

SEQ ID NO: 7348 - DNA, 23 bp, synthetic construct
  source 1..23: mol_type = other DNA
  modified_base 1: mod_base = OTHER; note = 2'-O-methyladenosine-3'-phosphorothioate
  modified_base 2: mod_base = OTHER; note = 2'-deoxyguanosine-3'-phosphorothioate
  modified_base 3: mod_base = OTHER; note = 2'-O-methyluridine-3'-phosphate
  modified_base 4: mod_base = OTHER; note = 2'-O-methylguanosine-3'-phosphate
  modified_base 6: mod_base = OTHER; note = 2'-O-methyladenosine-3'-phosphate
  modified_base 8: mod_base = OTHER; note = 2'-O-methylguanosine-3'-phosphate
  modified_base 9: mod_base = OTHER; note = 2'-O-methyladenosine-3'-phosphate
  modified_base 10: mod_base = OTHER; note = 2'-O-methyluridine-3'-phosphate
  modified_base 11: mod_base = OTHER; note = 2'-O-methylguanosine-3'-phosphate
  modified_base 13: mod_base = OTHER; note = 2'-O-methylguanosine-3'-phosphate
  modified_base 14: mod_base = OTHER; note = 2'-fluorouridine-3'-phosphate
  modified_base 15: mod_base = OTHER; note = 2'-O-methyluridine-3'-phosphate
  modified_base 16: mod_base = OTHER; note = 2'-O-methyladenosine-3'-phosphate
  modified_base 17: mod_base = OTHER; note = 2'-O-methyluridine-3'-phosphate
  modified_base 18: mod_base = OTHER; note = 2'-O-methyluridine-3'-phosphate
  modified_base 19: mod_base = OTHER; note = 2'-O-methylcytidine-3'-phosphate
  modified_base 20: mod_base = OTHER; note = 2'-O-methyluridine-3'-phosphate
  modified_base 21: mod_base = OTHER; note = 2'-O-methylguanosine-3'-phosphorothioate
  modified_base 22: mod_base = OTHER; note = 2'-O-methylguanosine-3'-phosphorothioate
  modified_base 23: mod_base = OTHER; note = 2'-O-methylguanosine-3'-phosphate
  misc_feature 1: note = RNA
  misc_feature 2: note = DNA
  misc_feature 3..4: note = RNA
  misc_feature 5: note = DNA
  misc_feature 6: note = RNA
  misc_feature 7: note = DNA
  misc_feature 8..11: note = RNA
  misc_feature 12: note = DNA
  misc_feature 13..23: note = RNA
agtggaggatgagttattctggg

SEQ ID NO: 7349 - DNA, 23 bp, synthetic construct
  source 1..23: mol_type = other DNA
  modified_base 1: mod_base = OTHER; note = 2'-O-methyladenosine-3'-phosphorothioate
  modified_base 2: mod_base = OTHER; note = 2'-deoxythimidine-3'-phosphorothioate
  modified_base 3: mod_base = OTHER; note = 2'-O-methyluridine-3'-phosphate
  modified_base 4: mod_base = OTHER; note = 2'-O-methylcytidine-3'-phosphate
  modified_base 6: mod_base = OTHER; note = 2'-O-methylcytidine-3'-phosphate
  modified_base 8: mod_base = OTHER; note = 2'-O-methylguanosine-3'-phosphate
  modified_base 9: mod_base = OTHER; note = 2'-O-methylguanosine-3'-phosphate
  modified_base 10: mod_base = OTHER; note = 2'-O-methyladenosine-3'-phosphate
  modified_base 11: mod_base = OTHER; note = 2'-O-methylguanosine-3'-phosphate
  modified_base 13: mod_base = OTHER; note = 2'-O-methylcytidine-3'-phosphate
  modified_base 14: mod_base = OTHER; note = 2'-fluoroadenosine-3'-phosphate
  modified_base 15: mod_base = OTHER; note = 2'-O-methylcytidine-3'-phosphate
  modified_base 16: mod_base = OTHER; note = 2'-O-methyladenosine-3'-phosphate
  modified_base 17: mod_base = OTHER; note = 2'-O-methylcytidine-3'-phosphate
  modified_base 18: mod_base = OTHER; note = 2'-O-methyluridine-3'-phosphate
  modified_base 19: mod_base = OTHER; note = 2'-O-methylcytidine-3'-phosphate
  modified_base 20: mod_base = OTHER; note = 2'-O-methylcytidine-3'-phosphate
  modified_base 21: mod_base = OTHER; note = 2'-O-methylcytidine-3'-phosphorothioate
  modified_base 22: mod_base = OTHER; note = 2'-O-methyluridine-3'-phosphorothioate
  modified_base 23: mod_base = OTHER; note = 2'-O-methylguanosine-3'-phosphate
  misc_feature 1: note = RNA
  misc_feature 2: note = DNA
  misc_feature 3..4: note = RNA
  misc_feature 5: note = DNA
  misc_feature 6: note = RNA
  misc_feature 7: note = DNA
  misc_feature 8..11: note = RNA
  misc_feature 12: note = DNA
  misc_feature 13..23: note = RNA
attccctggagccacactccctg

SEQ ID NO: 7350 - DNA, 23 bp, synthetic construct
  source 1..23: mol_type = other DNA
  modified_base 1: mod_base = OTHER; note = 2'-O-methyladenosine-3'-phosphorothioate
  modified_base 2: mod_base = OTHER; note = 2'-deoxyadenosine-3'-phosphorothioate
  modified_base 3: mod_base = OTHER; note = 2'-O-methyluridine-3'-phosphate
  modified_base 4: mod_base = OTHER; note = 2'-O-methyluridine-3'-phosphate
  modified_base 6: mod_base = OTHER; note = 2'-O-methylcytidine-3'-phosphate
  modified_base 8: mod_base = OTHER; note = 2'-O-methyluridine-3'-phosphate
  modified_base 9: mod_base = OTHER; note = 2'-O-methylguanosine-3'-phosphate
  modified_base 10: mod_base = OTHER; note = 2'-O-methylguanosine-3'-phosphate
  modified_base 11: mod_base = OTHER; note = 2'-O-methyladenosine-3'-phosphate
  modified_base 13: mod_base = OTHER; note = 2'-O-methylcytidine-3'-phosphate
  modified_base 14: mod_base = OTHER; note = 2'-fluorocytidine-3'-phosphate
  modified_base 15: mod_base = OTHER; note = 2'-O-methyladenosine-3'-phosphate
  modified_base 16: mod_base = OTHER; note = 2'-O-methylcytidine-3'-phosphate
  modified_base 17: mod_base = OTHER; note = 2'-O-methyladenosine-3'-phosphate
  modified_base 18: mod_base = OTHER; note = 2'-O-methylcytidine-3'-phosphate
  modified_base 19: mod_base = OTHER; note = 2'-O-methyluridine-3'-phosphate
  modified_base 20: mod_base = OTHER; note = 2'-O-methylcytidine-3'-phosphate
  modified_base 21: mod_base = OTHER; note = 2'-O-methylcytidine-3'-phosphorothioate
  modified_base 22: mod_base = OTHER; note = 2'-O-methylcytidine-3'-phosphorothioate
  modified_base 23: mod_base = OTHER; note = 2'-O-methyluridine-3'-phosphate
  misc_feature 1: note = RNA
  misc_feature 2: note = DNA
  misc_feature 3..4: note = RNA
  misc_feature 5: note = DNA
  misc_feature 6: note = RNA
  misc_feature 7: note = DNA
  misc_feature 8..11: note = RNA
  misc_feature 12: note = DNA
  misc_feature 13..23: note = RNA
aattccctggagccacactccct

SEQ ID NO: 7351 - DNA, 23 bp, synthetic construct
  source 1..23: mol_type = other DNA
  modified_base 1: mod_base = OTHER; note = 2'-O-methyladenosine-3'-phosphorothioate
  modified_base 2: mod_base = OTHER; note = 2'-deoxycytidine-3'-phosphorothioate
  modified_base 3: mod_base = OTHER; note = 2'-O-methyladenosine-3'-phosphate
  modified_base 4: mod_base = OTHER; note = 2'-O-methyluridine-3'-phosphate
  modified_base 6: mod_base = OTHER; note = 2'-O-methylcytidine-3'-phosphate
  modified_base 8: mod_base = OTHER; note = 2'-O-methylcytidine-3'-phosphate
  modified_base 9: mod_base = OTHER; note = 2'-O-methyluridine-3'-phosphate
  modified_base 10: mod_base = OTHER; note = 2'-O-methylguanosine-3'-phosphate
  modified_base 11: mod_base = OTHER; note = 2'-O-methylguanosine-3'-phosphate
  modified_base 13: mod_base = OTHER; note = 2'-O-methylguanosine-3'-phosphate
  modified_base 14: mod_base = OTHER; note = 2'-fluorocytidine-3'-phosphate
  modified_base 15: mod_base = OTHER; note = 2'-O-methylcytidine-3'-phosphate
  modified_base 16: mod_base = OTHER; note = 2'-O-methyladenosine-3'-phosphate
  modified_base 17: mod_base = OTHER; note = 2'-O-methylcytidine-3'-phosphate
  modified_base 18: mod_base = OTHER; note = 2'-O-methyladenosine-3'-phosphate
  modified_base 19: mod_base = OTHER; note = 2'-O-methylcytidine-3'-phosphate
  modified_base 20: mod_base = OTHER; note = 2'-O-methyluridine-3'-phosphate
  modified_base 21: mod_base = OTHER; note = 2'-O-methylcytidine-3'-phosphorothioate
  modified_base 22: mod_base = OTHER; note = 2'-O-methylcytidine-3'-phosphorothioate
  modified_base 23: mod_base = OTHER; note = 2'-O-methylcytidine-3'-phosphate
  misc_feature 1: note = RNA
  misc_feature 2: note = DNA
  misc_feature 3..4: note = RNA
  misc_feature 5: note = DNA
  misc_feature 6: note = RNA
  misc_feature 7: note = DNA
  misc_feature 8..11: note = RNA
  misc_feature 12: note = DNA
  misc_feature 13..23: note = RNA
acattccctggagccacactccc

SEQ ID NO: 7352 - DNA, 23 bp, synthetic construct
  source 1..23: mol_type = other DNA
  modified_base 1: mod_base = OTHER; note = 2'-O-methyladenosine-3'-phosphorothioate
  modified_base 2: mod_base = OTHER; note = 2'-deoxycytidine-3'-phosphorothioate
  modified_base 3: mod_base = OTHER; note = 2'-O-methylcytidine-3'-phosphate
  modified_base 4: mod_base = OTHER; note = 2'-O-methyladenosine-3'-phosphate
  modified_base 6: mod_base = OTHER; note = 2'-O-methyluridine-3'-phosphate
  modified_base 8: mod_base = OTHER; note = 2'-O-methylcytidine-3'-phosphate
  modified_base 9: mod_base = OTHER; note = 2'-O-methylcytidine-3'-phosphate
  modified_base 10: mod_base = OTHER; note = 2'-O-methyluridine-3'-phosphate
  modified_base 11: mod_base = OTHER; note = 2'-O-methylguanosine-3'-phosphate
  modified_base 13: mod_base = OTHER; note = 2'-O-methyladenosine-3'-phosphate
  modified_base 14: mod_base = OTHER; note = 2'-fluoroguanosine-3'-phosphate
  modified_base 15: mod_base = OTHER; note = 2'-O-methylcytidine-3'-phosphate
  modified_base 16: mod_base = OTHER; note = 2'-O-methylcytidine-3'-phosphate
  modified_base 17: mod_base = OTHER; note = 2'-O-methyladenosine-3'-phosphate
  modified_base 18: mod_base = OTHER; note = 2'-O-methylcytidine-3'-phosphate
  modified_base 19: mod_base = OTHER; note = 2'-O-methyladenosine-3'-phosphate
  modified_base 20: mod_base = OTHER; note = 2'-O-methylcytidine-3'-phosphate
  modified_base 21: mod_base = OTHER; note = 2'-O-methyluridine-3'-phosphorothioate
  modified_base 22: mod_base = OTHER; note = 2'-O-methylcytidine-3'-phosphorothioate
  modified_base 23: mod_base = OTHER; note = 2'-O-methylcytidine-3'-phosphate
  misc_feature 1: note = RNA
  misc_feature 2: note = DNA
  misc_feature 3..4: note = RNA
  misc_feature 5: note = DNA
  misc_feature 6: note = RNA
  misc_feature 7: note = DNA
  misc_feature 8..11: note = RNA
  misc_feature 12: note = DNA
  misc_feature 13..23: note = RNA
accattccctggagccacactcc

SEQ ID NO: 7353 - DNA, 23 bp, synthetic construct
  source 1..23: mol_type = other DNA
  modified_base 1: mod_base = OTHER; note = 2'-O-methyladenosine-3'-phosphorothioate
  modified_base 2: mod_base = OTHER; note = 2'-deoxyguanosine-3'-phosphorothioate
  modified_base 3: mod_base = OTHER; note = 2'-O-methylcytidine-3'-phosphate
  modified_base 4: mod_base = OTHER; note = 2'-O-methyladenosine-3'-phosphate
  modified_base 6: mod_base = OTHER; note = 2'-O-methyladenosine-3'-phosphate
  modified_base 8: mod_base = OTHER; note = 2'-O-methylcytidine-3'-phosphate
  modified_base 9: mod_base = OTHER; note = 2'-O-methyluridine-3'-phosphate
  modified_base 10: mod_base = OTHER; note = 2'-O-methylguanosine-3'-phosphate
  modified_base 11: mod_base = OTHER; note = 2'-O-methyladenosine-3'-phosphate
  modified_base 13: mod_base = OTHER; note = 2'-O-methylguanosine-3'-phosphate
  modified_base 14: mod_base = OTHER; note = 2'-fluoroadenosine-3'-phosphate
  modified_base 15: mod_base = OTHER; note = 2'-O-methylcytidine-3'-phosphate
  modified_base 16: mod_base = OTHER; note = 2'-O-methylcytidine-3'-phosphate
  modified_base 17: mod_base = OTHER; note = 2'-O-methyluridine-3'-phosphate
  modified_base 18: mod_base = OTHER; note = 2'-O-methylcytidine-3'-phosphate
  modified_base 19: mod_base = OTHER; note = 2'-O-methylcytidine-3'-phosphate
  modified_base 20: mod_base = OTHER; note = 2'-O-methyluridine-3'-phosphate
  modified_base 21: mod_base = OTHER; note = 2'-O-methylcytidine-3'-phosphorothioate
  modified_base 22: mod_base = OTHER; note = 2'-O-methylcytidine-3'-phosphorothioate
  modified_base 23: mod_base = OTHER; note = 2'-O-methylcytidine-3'-phosphate
  misc_feature 1: note = RNA
  misc_feature 2: note = DNA
  misc_feature 3..4: note = RNA
  misc_feature 5: note = DNA
  misc_feature 6: note = RNA
  misc_feature 7: note = DNA
  misc_feature 8..11: note = RNA
  misc_feature 12: note = DNA
  misc_feature 13..23: note = RNA
agcaaagctgatgacctcctccc

SEQ ID NO: 7354 - DNA, 23 bp, synthetic construct
  source 1..23: mol_type = other DNA
  modified_base 1: mod_base = OTHER; note = 2'-O-methyladenosine-3'-phosphorothioate
  modified_base 2: mod_base = OTHER; note = 2'-deoxyadenosine-3'-phosphorothioate
  modified_base 3: mod_base = OTHER; note = 2'-O-methylguanosine-3'-phosphate
  modified_base 4: mod_base = OTHER; note = 2'-O-methylcytidine-3'-phosphate
  modified_base 6: mod_base = OTHER; note = 2'-O-methyladenosine-3'-phosphate
  modified_base 8: mod_base = OTHER; note = 2'-O-methylguanosine-3'-phosphate
  modified_base 9: mod_base = OTHER; note = 2'-O-methylcytidine-3'-phosphate
  modified_base 10: mod_base = OTHER; note = 2'-O-methyluridine-3'-phosphate
  modified_base 11: mod_base = OTHER; note = 2'-O-methylguanosine-3'-phosphate
  modified_base 13: mod_base = OTHER; note = 2'-O-methyluridine-3'-phosphate
  modified_base 14: mod_base = OTHER; note = 2'-fluoroguanosine-3'-phosphate
  modified_base 15: mod_base = OTHER; note = 2'-O-methyladenosine-3'-phosphate
  modified_base 16: mod_base = OTHER; note = 2'-O-methylcytidine-3'-phosphate
  modified_base 17: mod_base = OTHER; note = 2'-O-methylcytidine-3'-phosphate
  modified_base 18: mod_base = OTHER; note = 2'-O-methyluridine-3'-phosphate
  modified_base 19: mod_base = OTHER; note = 2'-O-methylcytidine-3'-phosphate
  modified_base 20: mod_base = OTHER; note = 2'-O-methylcytidine-3'-phosphate
  modified_base 21: mod_base = OTHER; note = 2'-O-methyluridine-3'-phosphorothioate
  modified_base 22: mod_base = OTHER; note = 2'-O-methylcytidine-3'-phosphorothioate
  modified_base 23: mod_base = OTHER; note = 2'-O-methylcytidine-3'-phosphate
  misc_feature 1: note = RNA
  misc_feature 2: note = DNA
  misc_feature 3..4: note = RNA
  misc_feature 5: note = DNA
  misc_feature 6: note = RNA
  misc_feature 7: note = DNA
  misc_feature 8..11: note = RNA
  misc_feature 12: note = DNA
  misc_feature 13..23: note = RNA
aagcaaagctgatgacctcctcc

SEQ ID NO: 7355 - DNA, 23 bp, synthetic construct
  source 1..23: mol_type = other DNA
  modified_base 1: mod_base = OTHER; note = 2'-O-methyladenosine-3'-phosphorothioate
  modified_base 2: mod_base = OTHER; note = 2'-deoxythimidine-3'-phosphorothioate
  modified_base 3: mod_base = OTHER; note = 2'-O-methyladenosine-3'-phosphate
  modified_base 4: mod_base = OTHER; note = 2'-O-methylguanosine-3'-phosphate
  modified_base 6: mod_base = OTHER; note = 2'-O-methyladenosine-3'-phosphate
  modified_base 8: mod_base = OTHER; note = 2'-O-methyladenosine-3'-phosphate
  modified_base 9: mod_base = OTHER; note = 2'-O-methylguanosine-3'-phosphate
  modified_base 10: mod_base = OTHER; note = 2'-O-methylcytidine-3'-phosphate
  modified_base 11: mod_base = OTHER; note = 2'-O-methyluridine-3'-phosphate
  modified_base 13: mod_base = OTHER; note = 2'-O-methyladenosine-3'-phosphate
  modified_base 14: mod_base = OTHER; note = 2'-fluorouridine-3'-phosphate
  modified_base 15: mod_base = OTHER; note = 2'-O-methylguanosine-3'-phosphate
  modified_base 16: mod_base = OTHER; note = 2'-O-methyladenosine-3'-phosphate
  modified_base 17: mod_base = OTHER; note = 2'-O-methylcytidine-3'-phosphate
  modified_base 18: mod_base = OTHER; note = 2'-O-methylcytidine-3'-phosphate
  modified_base 19: mod_base = OTHER; note = 2'-O-methyluridine-3'-phosphate
  modified_base 20: mod_base = OTHER; note = 2'-O-methylcytidine-3'-phosphate
  modified_base 21: mod_base = OTHER; note = 2'-O-methylcytidine-3'-phosphorothioate
  modified_base 22: mod_base = OTHER; note = 2'-O-methyluridine-3'-phosphorothioate
  modified_base 23: mod_base = OTHER; note = 2'-O-methylcytidine-3'-phosphate
  misc_feature 1: note = RNA
  misc_feature 2: note = DNA
  misc_feature 3..4: note = RNA
  misc_feature 5: note = DNA
  misc_feature 6: note = RNA
  misc_feature 7: note = DNA
  misc_feature 8..11: note = RNA
  misc_feature 12: note = DNA
  misc_feature 13..23: note = RNA
atagcaaagctgatgacctcctc

SEQ ID NO: 7356 - DNA, 23 bp, synthetic construct
  source 1..23: mol_type = other DNA
  modified_base 1: mod_base = OTHER; note = 2'-O-methyladenosine-3'-phosphorothioate
  modified_base 2: mod_base = OTHER; note = 2'-deoxyguanosine-3'-phosphorothioate
  modified_base 3: mod_base = OTHER; note = 2'-O-methyluridine-3'-phosphate
  modified_base 4: mod_base = OTHER; note = 2'-O-methyladenosine-3'-phosphate
  modified_base 6: mod_base = OTHER; note = 2'-O-methylcytidine-3'-phosphate
  modified_base 8: mod_base = OTHER; note = 2'-O-methyladenosine-3'-phosphate
  modified_base 9: mod_base = OTHER; note = 2'-O-methyladenosine-3'-phosphate
  modified_base 10: mod_base = OTHER; note = 2'-O-methylguanosine-3'-phosphate
  modified_base 11: mod_base = OTHER; note = 2'-O-methylcytidine-3'-phosphate
  modified_base 13: mod_base = OTHER; note = 2'-O-methylguanosine-3'-phosphate
  modified_base 14: mod_base = OTHER; note = 2'-fluoroadenosine-3'-phosphate
  modified_base 15: mod_base = OTHER; note = 2'-O-methyluridine-3'-phosphate
  modified_base 16: mod_base = OTHER; note = 2'-O-methylguanosine-3'-phosphate
  modified_base 17: mod_base = OTHER; note = 2'-O-methyladenosine-3'-phosphate
  modified_base 18: mod_base = OTHER; note = 2'-O-methylcytidine-3'-phosphate
  modified_base 19: mod_base = OTHER; note = 2'-O-methylcytidine-3'-phosphate
  modified_base 20: mod_base = OTHER; note = 2'-O-methyluridine-3'-phosphate
  modified_base 21: mod_base = OTHER; note = 2'-O-methylcytidine-3'-phosphorothioate
  modified_base 22: mod_base = OTHER; note = 2'-O-methylcytidine-3'-phosphorothioate
  modified_base 23: mod_base = OTHER; note = 2'-O-methyluridine-3'-phosphate
  misc_feature 1: note = RNA
  misc_feature 2: note = DNA
  misc_feature 3..4: note = RNA
  misc_feature 5: note = DNA
  misc_feature 6: note = RNA
  misc_feature 7: note = DNA
  misc_feature 8..11: note = RNA
  misc_feature 12: note = DNA
  misc_feature 13..23: note = RNA
agtagcaaagctgatgacctcct

SEQ ID NO: 7357 - DNA, 23 bp, synthetic construct
  source 1..23: mol_type = other DNA
  modified_base 1: mod_base = OTHER; note = 2'-O-methyladenosine-3'-phosphorothioate
  modified_base 2: mod_base = OTHER; note = 2'-deoxyadenosine-3'-phosphorothioate
  modified_base 3: mod_base = OTHER; note = 2'-O-methylguanosine-3'-phosphate
  modified_base 4: mod_base = OTHER; note = 2'-O-methyluridine-3'-phosphate
  modified_base 6: mod_base = OTHER; note = 2'-O-methylguanosine-3'-phosphate
  modified_base 8: mod_base = OTHER; note = 2'-O-methyladenosine-3'-phosphate
  modified_base 9: mod_base = OTHER; note = 2'-O-methyladenosine-3'-phosphate
  modified_base 10: mod_base = OTHER; note = 2'-O-methyladenosine-3'-phosphate
  modified_base 11: mod_base = OTHER; note = 2'-O-methylguanosine-3'-phosphate
  modified_base 13: mod_base = OTHER; note = 2'-O-methyluridine-3'-phosphate
  modified_base 14: mod_base = OTHER; note = 2'-fluoroguanosine-3'-phosphate
  modified_base 15: mod_base = OTHER; note = 2'-O-methyladenosine-3'-phosphate
  modified_base 16: mod_base = OTHER; note = 2'-O-methyluridine-3'-phosphate
  modified_base 17: mod_base = OTHER; note = 2'-O-methylguanosine-3'-phosphate
  modified_base 18: mod_base = OTHER; note = 2'-O-methyladenosine-3'-phosphate
  modified_base 19: mod_base = OTHER; note = 2'-O-methylcytidine-3'-phosphate
  modified_base 20: mod_base = OTHER; note = 2'-O-methylcytidine-3'-phosphate
  modified_base 21: mod_base = OTHER; note = 2'-O-methyluridine-3'-phosphorothioate
  modified_base 22: mod_base = OTHER; note = 2'-O-methylcytidine-3'-phosphorothioate
  modified_base 23: mod_base = OTHER; note = 2'-O-methylcytidine-3'-phosphate
  misc_feature 1: note = RNA
  misc_feature 2: note = DNA
  misc_feature 3..4: note = RNA
  misc_feature 5: note = DNA
  misc_feature 6: note = RNA
  misc_feature 7: note = DNA
  misc_feature 8..11: note = RNA
  misc_feature 12: note = DNA
  misc_feature 13..23: note = RNA
aagtagcaaagctgatgacctcc

SEQ ID NO: 7358 - DNA, 23 bp, synthetic construct
  source 1..23: mol_type = other DNA
  modified_base 1: mod_base = OTHER; note = 2'-O-methyladenosine-3'-phosphorothioate
  modified_base 2: mod_base = OTHER; note = 2'-deoxycytidine-3'-phosphorothioate
  modified_base 3: mod_base = OTHER; note = 2'-O-methyladenosine-3'-phosphate
  modified_base 4: mod_base = OTHER; note = 2'-O-methylguanosine-3'-phosphate
  modified_base 6: mod_base = OTHER; note = 2'-O-methyladenosine-3'-phosphate
  modified_base 8: mod_base = OTHER; note = 2'-O-methylcytidine-3'-phosphate
  modified_base 9: mod_base = OTHER; note = 2'-O-methyladenosine-3'-phosphate
  modified_base 10: mod_base = OTHER; note = 2'-O-methyladenosine-3'-phosphate
  modified_base 11: mod_base = OTHER; note = 2'-O-methyladenosine-3'-phosphate
  modified_base 13: mod_base = OTHER; note = 2'-O-methylcytidine-3'-phosphate
  modified_base 14: mod_base = OTHER; note = 2'-fluorouridine-3'-phosphate
  modified_base 15: mod_base = OTHER; note = 2'-O-methylguanosine-3'-phosphate
  modified_base 16: mod_base = OTHER; note = 2'-O-methyladenosine-3'-phosphate
  modified_base 17: mod_base = OTHER; note = 2'-O-methyluridine-3'-phosphate
  modified_base 18: mod_base = OTHER; note = 2'-O-methylguanosine-3'-phosphate
  modified_base 19: mod_base = OTHER; note = 2'-O-methyladenosine-3'-phosphate
  modified_base 20: mod_base = OTHER; note = 2'-O-methylcytidine-3'-phosphate
  modified_base 21: mod_base = OTHER; note = 2'-O-methylcytidine-3'-phosphorothioate
  modified_base 22: mod_base = OTHER; note = 2'-O-methyluridine-3'-phosphorothioate
  modified_base 23: mod_base = OTHER; note = 2'-O-methylcytidine-3'-phosphate
  misc_feature 1: note = RNA
  misc_feature 2: note = DNA
  misc_feature 3..4: note = RNA
  misc_feature 5: note = DNA
  misc_feature 6: note = RNA
  misc_feature 7: note = DNA
  misc_feature 8..11: note = RNA
  misc_feature 12: note = DNA
  misc_feature 13..23: note = RNA
acagtagcaaagctgatgacctc

SEQ ID NO: 7359 - DNA, 23 bp, synthetic construct
  source 1..23: mol_type = other DNA
  modified_base 1: mod_base = OTHER; note = 2'-O-methyladenosine-3'-phosphorothioate
  modified_base 2: mod_base = OTHER; note = 2'-deoxyadenosine-3'-phosphorothioate
  modified_base 3: mod_base = OTHER; note = 2'-O-methylcytidine-3'-phosphate
  modified_base 4: mod_base = OTHER; note = 2'-O-methyladenosine-3'-phosphate
  modified_base 6: mod_base = OTHER; note = 2'-O-methyluridine-3'-phosphate
  modified_base 8: mod_base = OTHER; note = 2'-O-methylguanosine-3'-phosphate
  modified_base 9: mod_base = OTHER; note = 2'-O-methylcytidine-3'-phosphate
  modified_base 10: mod_base = OTHER; note = 2'-O-methyladenosine-3'-phosphate
  modified_base 11: mod_base = OTHER; note = 2'-O-methyladenosine-3'-phosphate
  modified_base 13: mod_base = OTHER; note = 2'-O-methylguanosine-3'-phosphate
  modified_base 14: mod_base = OTHER; note = 2'-fluorocytidine-3'-phosphate
  modified_base 15: mod_base = OTHER; note = 2'-O-methyluridine-3'-phosphate
  modified_base 16: mod_base = OTHER; note = 2'-O-methylguanosine-3'-phosphate
  modified_base 17: mod_base = OTHER; note = 2'-O-methyladenosine-3'-phosphate
  modified_base 18: mod_base = OTHER; note = 2'-O-methyluridine-3'-phosphate
  modified_base 19: mod_base = OTHER; note = 2'-O-methylguanosine-3'-phosphate
  modified_base 20: mod_base = OTHER; note = 2'-O-methyladenosine-3'-phosphate
  modified_base 21: mod_base = OTHER; note = 2'-O-methylcytidine-3'-phosphorothioate
  modified_base 22: mod_base = OTHER; note = 2'-O-methylcytidine-3'-phosphorothioate
  modified_base 23: mod_base = OTHER; note = 2'-O-methyluridine-3'-phosphate
  misc_feature 1: note = RNA
  misc_feature 2: note = DNA
  misc_feature 3..4: note = RNA
  misc_feature 5: note = DNA
  misc_feature 6: note = RNA
  misc_feature 7: note = DNA
  misc_feature 8..11: note = RNA
  misc_feature 12: note = DNA
  misc_feature 13..23: note = RNA
aacagtagcaaagctgatgacct

SEQ ID NO: 7360 - DNA, 23 bp, synthetic construct
  source 1..23: mol_type = other DNA
  modified_base 1: mod_base = OTHER; note = 2'-O-methyladenosine-3'-phosphorothioate
  modified_base 2: mod_base = OTHER; note = 2'-deoxyguanosine-3'-phosphorothioate
  modified_base 3: mod_base = OTHER; note = 2'-O-methyladenosine-3'-phosphate
  modified_base 4: mod_base = OTHER; note = 2'-O-methylcytidine-3'-phosphate
  modified_base 6: mod_base = OTHER; note = 2'-O-methylguanosine-3'-phosphate
  modified_base 8: mod_base = OTHER; note = 2'-O-methyladenosine-3'-phosphate
  modified_base 9: mod_base = OTHER; note = 2'-O-methylguanosine-3'-phosphate
  modified_base 10: mod_base = OTHER; note = 2'-O-methylcytidine-3'-phosphate
  modified_base 11: mod_base = OTHER; note = 2'-O-methyladenosine-3'-phosphate
  modified_base 13: mod_base = OTHER; note = 2'-O-methyladenosine-3'-phosphate
  modified_base 14: mod_base = OTHER; note = 2'-fluoroguanosine-3'-phosphate
  modified_base 15: mod_base = OTHER; note = 2'-O-methylcytidine-3'-phosphate
  modified_base 16: mod_base = OTHER; note = 2'-O-methyluridine-3'-phosphate
  modified_base 17: mod_base = OTHER; note = 2'-O-methylguanosine-3'-phosphate
  modified_base 18: mod_base = OTHER; note = 2'-O-methyladenosine-3'-phosphate
  modified_base 19: mod_base = OTHER; note = 2'-O-methyluridine-3'-phosphate
  modified_base 20: mod_base = OTHER; note = 2'-O-methylguanosine-3'-phosphate
  modified_base 21: mod_base = OTHER; note = 2'-O-methyladenosine-3'-phosphorothioate
  modified_base 22: mod_base = OTHER; note = 2'-O-methylcytidine-3'-phosphorothioate
  modified_base 23: mod_base = OTHER; note = 2'-O-methylcytidine-3'-phosphate
  misc_feature 1: note = RNA
  misc_feature 2: note = DNA
  misc_feature 3..4: note = RNA
  misc_feature 5: note = DNA
  misc_feature 6: note = RNA
  misc_feature 7: note = DNA
  misc_feature 8..11: note = RNA
  misc_feature 12: note = DNA
  misc_feature 13..23: note = RNA
agacagtagcaaagctgatgacc

SEQ ID NO: 7361 - DNA, 23 bp, synthetic construct
  source 1..23: mol_type = other DNA
  modified_base 1: mod_base = OTHER; note = 2'-O-methyladenosine-3'-phosphorothioate
  modified_base 2: mod_base = OTHER; note = 2'-deoxythimidine-3'-phosphorothioate
  modified_base 3: mod_base = OTHER; note = 2'-O-methylguanosine-3'-phosphate
  modified_base 4: mod_base = OTHER; note = 2'-O-methyluridine-3'-phosphate
  modified_base 6: mod_base = OTHER; note = 2'-O-methyladenosine-3'-phosphate
  modified_base 8: mod_base = OTHER; note = 2'-O-methyladenosine-3'-phosphate
  modified_base 9: mod_base = OTHER; note = 2'-O-methylguanosine-3'-phosphate
  modified_base 10: mod_base = OTHER; note = 2'-O-methyluridine-3'-phosphate
  modified_base 11: mod_base = OTHER; note = 2'-O-methyladenosine-3'-phosphate
  modified_base 13: mod_base = OTHER; note = 2'-O-methylcytidine-3'-phosphate
  modified_base 14: mod_base = OTHER; note = 2'-fluoroadenosine-3'-phosphate
  modified_base 15: mod_base = OTHER; note = 2'-O-methyladenosine-3'-phosphate
  modified_base 16: mod_base = OTHER; note = 2'-O-methyladenosine-3'-phosphate
  modified_base 17: mod_base = OTHER; note = 2'-O-methylguanosine-3'-phosphate
  modified_base 18: mod_base = OTHER; note = 2'-O-methylcytidine-3'-phosphate
  modified_base 19: mod_base = OTHER; note = 2'-O-methyluridine-3'-phosphate
  modified_base 20: mod_base = OTHER; note = 2'-O-methylguanosine-3'-phosphate
  modified_base 21: mod_base = OTHER; note = 2'-O-methyladenosine-3'-phosphorothioate
  modified_base 22: mod_base = OTHER; note = 2'-O-methyluridine-3'-phosphorothioate
  modified_base 23: mod_base = OTHER; note = 2'-O-methylguanosine-3'-phosphate
  misc_feature 1: note = RNA
  misc_feature 2: note = DNA
  misc_feature 3..4: note = RNA
  misc_feature 5: note = DNA
  misc_feature 6: note = RNA
  misc_feature 7: note = DNA
  misc_feature 8..11: note = RNA
  misc_feature 12: note = DNA
  misc_feature 13..23: note = RNA
atgtgacagtagcaaagctgatg

SEQ ID NO: 7362 - DNA, 23 bp, synthetic construct
  source 1..23: mol_type = other DNA
  modified_base 1: mod_base = OTHER; note = 2'-O-methyladenosine-3'-phosphorothioate
  modified_base 2: mod_base = OTHER; note = 2'-deoxycytidine-3'-phosphorothioate
  modified_base 3: mod_base = OTHER; note = 2'-O-methyluridine-3'-phosphate
  modified_base 4: mod_base = OTHER; note = 2'-O-methylguanosine-3'-phosphate
  modified_base 6: mod_base = OTHER; note = 2'-O-methylguanosine-3'-phosphate
  modified_base 8: mod_base = OTHER; note = 2'-O-methylcytidine-3'-phosphate
  modified_base 9: mod_base = OTHER; note = 2'-O-methyladenosine-3'-phosphate
  modified_base 10: mod_base = OTHER; note = 2'-O-methylguanosine-3'-phosphate
  modified_base 11: mod_base = OTHER; note = 2'-O-methyluridine-3'-phosphate
  modified_base 13: mod_base = OTHER; note = 2'-O-methylguanosine-3'-phosphate
  modified_base 14: mod_base = OTHER; note = 2'-fluorocytidine-3'-phosphate
  modified_base 15: mod_base = OTHER; note = 2'-O-methyladenosine-3'-phosphate
  modified_base 16: mod_base = OTHER; note = 2'-O-methyladenosine-3'-phosphate
  modified_base 17: mod_base = OTHER; note = 2'-O-methyladenosine-3'-phosphate
  modified_base 18: mod_base = OTHER; note = 2'-O-methylguanosine-3'-phosphate
  modified_base 19: mod_base = OTHER; note = 2'-O-methylcytidine-3'-phosphate
  modified_base 20: mod_base = OTHER; note = 2'-O-methyluridine-3'-phosphate
  modified_base 21: mod_base = OTHER; note = 2'-O-methylguanosine-3'-phosphorothioate
  modified_base 22: mod_base = OTHER; note = 2'-O-methyladenosine-3'-phosphorothioate
  modified_base 23: mod_base = OTHER; note = 2'-O-methyluridine-3'-phosphate
  misc_feature 1: note = RNA
  misc_feature 2: note = DNA
  misc_feature 3..4: note = RNA
  misc_feature 5: note = DNA
  misc_feature 6: note = RNA
  misc_feature 7: note = DNA
  misc_feature 8..11: note = RNA
  misc_feature 12: note = DNA
  misc_feature 13..23: note = RNA
actgtgacagtagcaaagctgat

SEQ ID NO: 7363 - DNA, 23 bp, synthetic construct
  source 1..23: mol_type = other DNA
  modified_base 1: mod_base = OTHER; note = 2'-O-methyladenosine-3'-phosphorothioate
  modified_base 2: mod_base = OTHER; note = 2'-deoxythimidine-3'-phosphorothioate
  modified_base 3: mod_base = OTHER; note = 2'-O-methylcytidine-3'-phosphate
  modified_base 4: mod_base = OTHER; note = 2'-O-methyluridine-3'-phosphate
  modified_base 6: mod_base = OTHER; note = 2'-O-methyluridine-3'-phosphate
  modified_base 8: mod_base = OTHER; note = 2'-O-methyladenosine-3'-phosphate
  modified_base 9: mod_base = OTHER; note = 2'-O-methylcytidine-3'-phosphate
  modified_base 10: mod_base = OTHER; note = 2'-O-methyladenosine-3'-phosphate
  modified_base 11: mod_base = OTHER; note = 2'-O-methylguanosine-3'-phosphate
  modified_base 13: mod_base = OTHER; note = 2'-O-methyladenosine-3'-phosphate
  modified_base 14: mod_base = OTHER; note = 2'-fluoroguanosine-3'-phosphate
  modified_base 15: mod_base = OTHER; note = 2'-O-methylcytidine-3'-phosphate
  modified_base 16: mod_base = OTHER; note = 2'-O-methyladenosine-3'-phosphate
  modified_base 17: mod_base = OTHER; note = 2'-O-methyladenosine-3'-phosphate
  modified_base 18: mod_base = OTHER; note = 2'-O-methyladenosine-3'-phosphate
  modified_base 19: mod_base = OTHER; note = 2'-O-methylguanosine-3'-phosphate
  modified_base 20: mod_base = OTHER; note = 2'-O-methylcytidine-3'-phosphate
  modified_base 21: mod_base = OTHER; note = 2'-O-methyluridine-3'-phosphorothioate
  modified_base 22: mod_base = OTHER; note = 2'-O-methylguanosine-3'-phosphorothioate
  modified_base 23: mod_base = OTHER; note = 2'-O-methyladenosine-3'-phosphate
  misc_feature 1: note = RNA
  misc_feature 2: note = DNA
  misc_feature 3..4: note = RNA
  misc_feature 5: note = DNA
  misc_feature 6: note = RNA
  misc_feature 7: note = DNA
  misc_feature 8..11: note = RNA
  misc_feature 12: note = DNA
  misc_feature 13..23: note = RNA
atctgtgacagtagcaaagctga

SEQ ID NO: 7364 - DNA, 23 bp, synthetic construct
  source 1..23: mol_type = other DNA
  modified_base 1: mod_base = OTHER; note = 2'-O-methyladenosine-3'-phosphorothioate
  modified_base 2: mod_base = OTHER; note = 2'-deoxyguanosine-3'-phosphorothioate
  modified_base 3: mod_base = OTHER; note = 2'-O-methyluridine-3'-phosphate
  modified_base 4: mod_base = OTHER; note = 2'-O-methylcytidine-3'-phosphate
  modified_base 6: mod_base = OTHER; note = 2'-O-methylguanosine-3'-phosphate
  modified_base 8: mod_base = OTHER; note = 2'-O-methylguanosine-3'-phosphate
  modified_base 9: mod_base = OTHER; note = 2'-O-methyladenosine-3'-phosphate
  modified_base 10: mod_base = OTHER; note = 2'-O-methylcytidine-3'-phosphate
  modified_base 11: mod_base = OTHER; note = 2'-O-methyladenosine-3'-phosphate
  modified_base 13: mod_base = OTHER; note = 2'-O-methyluridine-3'-phosphate
  modified_base 14: mod_base = OTHER; note = 2'-fluoroadenosine-3'-phosphate
  modified_base 15: mod_base = OTHER; note = 2'-O-methylguanosine-3'-phosphate
  modified_base 16: mod_base = OTHER; note = 2'-O-methylcytidine-3'-phosphate
  modified_base 17: mod_base = OTHER; note = 2'-O-methyladenosine-3'-phosphate
  modified_base 18: mod_base = OTHER; note = 2'-O-methyladenosine-3'-phosphate
  modified_base 19: mod_base = OTHER; note = 2'-O-methyladenosine-3'-phosphate
  modified_base 20: mod_base = OTHER; note = 2'-O-methylguanosine-3'-phosphate
  modified_base 21: mod_base = OTHER; note = 2'-O-methylcytidine-3'-phosphorothioate
  modified_base 22: mod_base = OTHER; note = 2'-O-methyluridine-3'-phosphorothioate
  modified_base 23: mod_base = OTHER; note = 2'-O-methylguanosine-3'-phosphate
  misc_feature 1: note = RNA
  misc_feature 2: note = DNA
  misc_feature 3..4: note = RNA
  misc_feature 5: note = DNA
  misc_feature 6: note = RNA
  misc_feature 7: note = DNA
  misc_feature 8..11: note = RNA
  misc_feature 12: note = DNA
  misc_feature 13..23: note = RNA
agtctgtgacagtagcaaagctg

SEQ ID NO: 7365 - DNA, 23 bp, synthetic construct
  source 1..23: mol_type = other DNA
  modified_base 1: mod_base = OTHER; note = 2'-O-methyladenosine-3'-phosphorothioate
  modified_base 2: mod_base = OTHER; note = 2'-deoxyadenosine-3'-phosphorothioate
  modified_base 3: mod_base = OTHER; note = 2'-O-methylguanosine-3'-phosphate
  modified_base 4: mod_base = OTHER; note = 2'-O-methyluridine-3'-phosphate
  modified_base 6: mod_base = OTHER; note = 2'-O-methyluridine-3'-phosphate
  modified_base 8: mod_base = OTHER; note = 2'-O-methyluridine-3'-phosphate
  modified_base 9: mod_base = OTHER; note = 2'-O-methylguanosine-3'-phosphate
  modified_base 10: mod_base = OTHER; note = 2'-O-methyladenosine-3'-phosphate
  modified_base 11: mod_base = OTHER; note = 2'-O-methylcytidine-3'-phosphate
  modified_base 13: mod_base = OTHER; note = 2'-O-methylguanosine-3'-phosphate
  modified_base 14: mod_base = OTHER; note = 2'-fluorouridine-3'-phosphate
  modified_base 15: mod_base = OTHER; note = 2'-O-methyladenosine-3'-phosphate
  modified_base 16: mod_base = OTHER; note = 2'-O-methylguanosine-3'-phosphate
  modified_base 17: mod_base = OTHER; note = 2'-O-methylcytidine-3'-phosphate
  modified_base 18: mod_base = OTHER; note = 2'-O-methyladenosine-3'-phosphate
  modified_base 19: mod_base = OTHER; note = 2'-O-methyladenosine-3'-phosphate
  modified_base 20: mod_base = OTHER; note = 2'-O-methyladenosine-3'-phosphate
  modified_base 21: mod_base = OTHER; note = 2'-O-methylguanosine-3'-phosphorothioate
  modified_base 22: mod_base = OTHER; note = 2'-O-methylcytidine-3'-phosphorothioate
  modified_base 23: mod_base = OTHER; note = 2'-O-methyluridine-3'-phosphate
  misc_feature 1: note = RNA
  misc_feature 2: note = DNA
  misc_feature 3..4: note = RNA
  misc_feature 5: note = DNA
  misc_feature 6: note = RNA
  misc_feature 7: note = DNA
  misc_feature 8..11: note = RNA
  misc_feature 12: note = DNA
  misc_feature 13..23: note = RNA
aagtctgtgacagtagcaaagct

SEQ ID NO: 7366 - DNA, 23 bp, synthetic construct
  source 1..23: mol_type = other DNA
  modified_base 1: mod_base = OTHER; note = 2'-O-methyladenosine-3'-phosphorothioate
  modified_base 2: mod_base = OTHER; note = 2'-deoxyguanosine-3'-phosphorothioate
  modified_base 3: mod_base = OTHER; note = 2'-O-methyladenosine-3'-phosphate
  modified_base 4: mod_base = OTHER; note = 2'-O-methylguanosine-3'-phosphate
  modified_base 6: mod_base = OTHER; note = 2'-O-methylcytidine-3'-phosphate
  modified_base 8: mod_base = OTHER; note = 2'-O-methylguanosine-3'-phosphate
  modified_base 9: mod_base = OTHER; note = 2'-O-methyluridine-3'-phosphate
  modified_base 10: mod_base = OTHER; note = 2'-O-methylguanosine-3'-phosphate
  modified_base 11: mod_base = OTHER; note = 2'-O-methyladenosine-3'-phosphate
  modified_base 13: mod_base = OTHER; note = 2'-O-methyladenosine-3'-phosphate
  modified_base 14: mod_base = OTHER; note = 2'-fluoroguanosine-3'-phosphate
  modified_base 15: mod_base = OTHER; note = 2'-O-methyluridine-3'-phosphate
  modified_base 16: mod_base = OTHER; note = 2'-O-methyladenosine-3'-phosphate
  modified_base 17: mod_base = OTHER; note = 2'-O-methylguanosine-3'-phosphate
  modified_base 18: mod_base = OTHER; note = 2'-O-methylcytidine-3'-phosphate
  modified_base 19: mod_base = OTHER; note = 2'-O-methyladenosine-3'-phosphate
  modified_base 20: mod_base = OTHER; note = 2'-O-methyladenosine-3'-phosphate
  modified_base 21: mod_base = OTHER; note = 2'-O-methyladenosine-3'-phosphorothioate
  modified_base 22: mod_base = OTHER; note = 2'-O-methylguanosine-3'-phosphorothioate
  modified_base 23: mod_base = OTHER; note = 2'-O-methylcytidine-3'-phosphate
  misc_feature 1: note = RNA
  misc_feature 2: note = DNA
  misc_feature 3..4: note = RNA
  misc_feature 5: note = DNA
  misc_feature 6: note = RNA
  misc_feature 7: note = DNA
  misc_feature 8..11: note = RNA
  misc_feature 12: note = DNA
  misc_feature 13..23: note = RNA
agagtctgtgacagtagcaaagc

SEQ ID NO: 7367 - DNA, 23 bp, synthetic construct
  source 1..23: mol_type = other DNA
  modified_base 1: mod_base = OTHER; note = 2'-O-methyladenosine-3'-phosphorothioate
  modified_base 2: mod_base = OTHER; note = 2'-deoxyguanosine-3'-phosphorothioate
  modified_base 3: mod_base = OTHER; note = 2'-O-methylguanosine-3'-phosphate
  modified_base 4: mod_base = OTHER; note = 2'-O-methyladenosine-3'-phosphate
  modified_base 6: mod_base = OTHER; note = 2'-O-methyluridine-3'-phosphate
  modified_base 8: mod_base = OTHER; note = 2'-O-methyluridine-3'-phosphate
  modified_base 9: mod_base = OTHER; note = 2'-O-methylguanosine-3'-phosphate
  modified_base 10: mod_base = OTHER; note = 2'-O-methyluridine-3'-phosphate
  modified_base 11: mod_base = OTHER; note = 2'-O-methylguanosine-3'-phosphate
  modified_base 13: mod_base = OTHER; note = 2'-O-methylcytidine-3'-phosphate
  modified_base 14: mod_base = OTHER; note = 2'-fluoroadenosine-3'-phosphate
  modified_base 15: mod_base = OTHER; note = 2'-O-methylguanosine-3'-phosphate
  modified_base 16: mod_base = OTHER; note = 2'-O-methyluridine-3'-phosphate
  modified_base 17: mod_base = OTHER; note = 2'-O-methyladenosine-3'-phosphate
  modified_base 18: mod_base = OTHER; note = 2'-O-methylguanosine-3'-phosphate
  modified_base 19: mod_base = OTHER; note = 2'-O-methylcytidine-3'-phosphate
  modified_base 20: mod_base = OTHER; note = 2'-O-methyladenosine-3'-phosphate
  modified_base 21: mod_base = OTHER; note = 2'-O-methyladenosine-3'-phosphorothioate
  modified_base 22: mod_base = OTHER; note = 2'-O-methyladenosine-3'-phosphorothioate
  modified_base 23: mod_base = OTHER; note = 2'-O-methylguanosine-3'-phosphate
  misc_feature 1: note = RNA
  misc_feature 2: note = DNA
  misc_feature 3..4: note = RNA
  misc_feature 5: note = DNA
  misc_feature 6: note = RNA
  misc_feature 7: note = DNA
  misc_feature 8..11: note = RNA
  misc_feature 12: note = DNA
  misc_feature 13..23: note = RNA
aggagtctgtgacagtagcaaag

SEQ ID NO: 7368 - DNA, 23 bp, synthetic construct
  source 1..23: mol_type = other DNA
  modified_base 1: mod_base = OTHER; note = 2'-O-methyladenosine-3'-phosphorothioate
  modified_base 2: mod_base = OTHER; note = 2'-deoxythimidine-3'-phosphorothioate
  modified_base 3: mod_base = OTHER; note = 2'-O-methylguanosine-3'-phosphate
  modified_base 4: mod_base = OTHER; note = 2'-O-methylguanosine-3'-phosphate
  modified_base 6: mod_base = OTHER; note = 2'-O-methylguanosine-3'-phosphate
  modified_base 8: mod_base = OTHER; note = 2'-O-methylcytidine-3'-phosphate
  modified_base 9: mod_base = OTHER; note = 2'-O-methyluridine-3'-phosphate
  modified_base 10: mod_base = OTHER; note = 2'-O-methylguanosine-3'-phosphate
  modified_base 11: mod_base = OTHER; note = 2'-O-methyluridine-3'-phosphate
  modified_base 13: mod_base = OTHER; note = 2'-O-methyladenosine-3'-phosphate
  modified_base 14: mod_base = OTHER; note = 2'-fluorocytidine-3'-phosphate
  modified_base 15: mod_base = OTHER; note = 2'-O-methyladenosine-3'-phosphate
  modified_base 16: mod_base = OTHER; note = 2'-O-methylguanosine-3'-phosphate
  modified_base 17: mod_base = OTHER; note = 2'-O-methyluridine-3'-phosphate
  modified_base 18: mod_base = OTHER; note = 2'-O-methyladenosine-3'-phosphate
  modified_base 19: mod_base = OTHER; note = 2'-O-methylguanosine-3'-phosphate
  modified_base 20: mod_base = OTHER; note = 2'-O-methylcytidine-3'-phosphate
  modified_base 21: mod_base = OTHER; note = 2'-O-methyladenosine-3'-phosphorothioate
  modified_base 22: mod_base = OTHER; note = 2'-O-methyladenosine-3'-phosphorothioate
  modified_base 23: mod_base = OTHER; note = 2'-O-methyladenosine-3'-phosphate
  misc_feature 1: note = RNA
  misc_feature 2: note = DNA
  misc_feature 3..4: note = RNA
  misc_feature 5: note = DNA
  misc_feature 6: note = RNA
  misc_feature 7: note = DNA
  misc_feature 8..11: note = RNA
  misc_feature 12: note = DNA
  misc_feature 13..23: note = RNA
atggagtctgtgacagtagcaaa

SEQ ID NO: 7369 - DNA, 23 bp, synthetic construct
  source 1..23: mol_type = other DNA
  modified_base 1: mod_base = OTHER; note = 2'-O-methyladenosine-3'-phosphorothioate
  modified_base 2: mod_base = OTHER; note = 2'-deoxyguanosine-3'-phosphorothioate
  modified_base 3: mod_base = OTHER; note = 2'-O-methyladenosine-3'-phosphate
  modified_base 4: mod_base = OTHER; note = 2'-O-methyladenosine-3'-phosphate
  modified_base 6: mod_base = OTHER; note = 2'-O-methyluridine-3'-phosphate
  modified_base 8: mod_base = OTHER; note = 2'-O-methylguanosine-3'-phosphate
  modified_base 9: mod_base = OTHER; note = 2'-O-methyladenosine-3'-phosphate
  modified_base 10: mod_base = OTHER; note = 2'-O-methylguanosine-3'-phosphate
  modified_base 11: mod_base = OTHER; note = 2'-O-methyluridine-3'-phosphate
  modified_base 13: mod_base = OTHER; note = 2'-O-methyluridine-3'-phosphate
  modified_base 14: mod_base = OTHER; note = 2'-fluoroguanosine-3'-phosphate
  modified_base 15: mod_base = OTHER; note = 2'-O-methyluridine-3'-phosphate
  modified_base 16: mod_base = OTHER; note = 2'-O-methylguanosine-3'-phosphate
  modified_base 17: mod_base = OTHER; note = 2'-O-methyladenosine-3'-phosphate
  modified_base 18: mod_base = OTHER; note = 2'-O-methylcytidine-3'-phosphate
  modified_base 19: mod_base = OTHER; note = 2'-O-methyladenosine-3'-phosphate
  modified_base 20: mod_base = OTHER; note = 2'-O-methylguanosine-3'-phosphate
  modified_base 21: mod_base = OTHER; note = 2'-O-methyluridine-3'-phosphorothioate
  modified_base 22: mod_base = OTHER; note = 2'-O-methyladenosine-3'-phosphorothioate
  modified_base 23: mod_base = OTHER; note = 2'-O-methylguanosine-3'-phosphate
  misc_feature 1: note = RNA
  misc_feature 2: note = DNA
  misc_feature 3..4: note = RNA
  misc_feature 5: note = DNA
  misc_feature 6: note = RNA
  misc_feature 7: note = DNA
  misc_feature 8..11: note = RNA
  misc_feature 12: note = DNA
  misc_feature 13..23: note = RNA
agaagtggagtctgtgacagtag

SEQ ID NO: 7370 - DNA, 23 bp, synthetic construct
  source 1..23: mol_type = other DNA
  modified_base 1: mod_base = OTHER; note = 2'-O-methyladenosine-3'-phosphorothioate
  modified_base 2: mod_base = OTHER; note = 2'-deoxythimidine-3'-phosphorothioate
  modified_base 3: mod_base = OTHER; note = 2'-O-methylguanosine-3'-phosphate
  modified_base 4: mod_base = OTHER; note = 2'-O-methyladenosine-3'-phosphate
  modified_base 6: mod_base = OTHER; note = 2'-O-methylguanosine-3'-phosphate
  modified_base 8: mod_base = OTHER; note = 2'-O-methylguanosine-3'-phosphate
  modified_base 9: mod_base = OTHER; note = 2'-O-methylguanosine-3'-phosphate
  modified_base 10: mod_base = OTHER; note = 2'-O-methyladenosine-3'-phosphate
  modified_base 11: mod_base = OTHER; note = 2'-O-methylguanosine-3'-phosphate
  modified_base 13: mod_base = OTHER; note = 2'-O-methylcytidine-3'-phosphate
  modified_base 14: mod_base = OTHER; note = 2'-fluorouridine-3'-phosphate
  modified_base 15: mod_base = OTHER; note = 2'-O-methylguanosine-3'-phosphate
  modified_base 16: mod_base = OTHER; note = 2'-O-methyluridine-3'-phosphate
  modified_base 17: mod_base = OTHER; note = 2'-O-methylguanosine-3'-phosphate
  modified_base 18: mod_base = OTHER; note = 2'-O-methyladenosine-3'-phosphate
  modified_base 19: mod_base = OTHER; note = 2'-O-methylcytidine-3'-phosphate
  modified_base 20: mod_base = OTHER; note = 2'-O-methyladenosine-3'-phosphate
  modified_base 21: mod_base = OTHER; note = 2'-O-methylguanosine-3'-phosphorothioate
  modified_base 22: mod_base = OTHER; note = 2'-O-methyluridine-3'-phosphorothioate
  modified_base 23: mod_base = OTHER; note = 2'-O-methyladenosine-3'-phosphate
  misc_feature 1: note = RNA
  misc_feature 2: note = DNA
  misc_feature 3..4: note = RNA
  misc_feature 5: note = DNA
  misc_feature 6: note = RNA
  misc_feature 7: note = DNA
  misc_feature 8..11: note = RNA
  misc_feature 12: note = DNA
  misc_feature 13..23: note = RNA
atgaagtggagtctgtgacagta

SEQ ID NO: 7371 - DNA, 23 bp, synthetic construct
  source 1..23: mol_type = other DNA
  modified_base 1: mod_base = OTHER; note = 2'-O-methyladenosine-3'-phosphorothioate
  modified_base 2: mod_base = OTHER; note = 2'-deoxyguanosine-3'-phosphorothioate
  modified_base 3: mod_base = OTHER; note = 2'-O-methylguanosine-3'-phosphate
  modified_base 4: mod_base = OTHER; note = 2'-O-methylcytidine-3'-phosphate
  modified_base 6: mod_base = OTHER; note = 2'-O-methylguanosine-3'-phosphate
  modified_base 8: mod_base = OTHER; note = 2'-O-methyladenosine-3'-phosphate
  modified_base 9: mod_base = OTHER; note = 2'-O-methylguanosine-3'-phosphate
  modified_base 10: mod_base = OTHER; note = 2'-O-methyluridine-3'-phosphate
  modified_base 11: mod_base = OTHER; note = 2'-O-methylguanosine-3'-phosphate
  modified_base 13: mod_base = OTHER; note = 2'-O-methyladenosine-3'-phosphate
  modified_base 14: mod_base = OTHER; note = 2'-fluoroguanosine-3'-phosphate
  modified_base 15: mod_base = OTHER; note = 2'-O-methyluridine-3'-phosphate
  modified_base 16: mod_base = OTHER; note = 2'-O-methylcytidine-3'-phosphate
  modified_base 17: mod_base = OTHER; note = 2'-O-methyluridine-3'-phosphate
  modified_base 18: mod_base = OTHER; note = 2'-O-methylguanosine-3'-phosphate
  modified_base 19: mod_base = OTHER; note = 2'-O-methyluridine-3'-phosphate
  modified_base 20: mod_base = OTHER; note = 2'-O-methylguanosine-3'-phosphate
  modified_base 21: mod_base = OTHER; note = 2'-O-methyladenosine-3'-phosphorothioate
  modified_base 22: mod_base = OTHER; note = 2'-O-methylcytidine-3'-phosphorothioate
  modified_base 23: mod_base = OTHER; note = 2'-O-methyladenosine-3'-phosphate
  misc_feature 1: note = RNA
  misc_feature 2: note = DNA
  misc_feature 3..4: note = RNA
  misc_feature 5: note = DNA
  misc_feature 6: note = RNA
  misc_feature 7: note = DNA
  misc_feature 8..11: note = RNA
  misc_feature 12: note = DNA
  misc_feature 13..23: note = RNA
aggctgaagtggagtctgtgaca

SEQ ID NO: 7372 - DNA, 23 bp, synthetic construct
  source 1..23: mol_type = other DNA
  modified_base 1: mod_base = OTHER; note = 2'-O-methyladenosine-3'-phosphorothioate
  modified_base 2: mod_base = OTHER; note = 2'-deoxyadenosine-3'-phosphorothioate
  modified_base 3: mod_base = OTHER; note = 2'-O-methylguanosine-3'-phosphate
  modified_base 4: mod_base = OTHER; note = 2'-O-methylguanosine-3'-phosphate
  modified_base 6: mod_base = OTHER; note = 2'-O-methyluridine-3'-phosphate
  modified_base 8: mod_base = OTHER; note = 2'-O-methyladenosine-3'-phosphate
  modified_base 9: mod_base = OTHER; note = 2'-O-methyladenosine-3'-phosphate
  modified_base 10: mod_base = OTHER; note = 2'-O-methylguanosine-3'-phosphate
  modified_base 11: mod_base = OTHER; note = 2'-O-methyluridine-3'-phosphate
  modified_base 13: mod_base = OTHER; note = 2'-O-methylguanosine-3'-phosphate
  modified_base 14: mod_base = OTHER; note = 2'-fluoroadenosine-3'-phosphate
  modified_base 15: mod_base = OTHER; note = 2'-O-methylguanosine-3'-phosphate
  modified_base 16: mod_base = OTHER; note = 2'-O-methyluridine-3'-phosphate
  modified_base 17: mod_base = OTHER; note = 2'-O-methylcytidine-3'-phosphate
  modified_base 18: mod_base = OTHER; note = 2'-O-methyluridine-3'-phosphate
  modified_base 19: mod_base = OTHER; note = 2'-O-methylguanosine-3'-phosphate
  modified_base 20: mod_base = OTHER; note = 2'-O-methyluridine-3'-phosphate
  modified_base 21: mod_base = OTHER; note = 2'-O-methylguanosine-3'-phosphorothioate
  modified_base 22: mod_base = OTHER; note = 2'-O-methyladenosine-3'-phosphorothioate
  modified_base 23: mod_base = OTHER; note = 2'-O-methylcytidine-3'-phosphate
  misc_feature 1: note = RNA
  misc_feature 2: note = DNA
  misc_feature 3..4: note = RNA
  misc_feature 5: note = DNA
  misc_feature 6: note = RNA
  misc_feature 7: note = DNA
  misc_feature 8..11: note = RNA
  misc_feature 12: note = DNA
  misc_feature 13..23: note = RNA
aaggctgaagtggagtctgtgac

SEQ ID NO: 7373 - DNA, 23 bp, synthetic construct
  source 1..23: mol_type = other DNA
  modified_base 1: mod_base = OTHER; note = 2'-O-methyladenosine-3'-phosphorothioate
  modified_base 2: mod_base = OTHER; note = 2'-deoxythimidine-3'-phosphorothioate
  modified_base 3: mod_base = OTHER; note = 2'-O-methyladenosine-3'-phosphate
  modified_base 4: mod_base = OTHER; note = 2'-O-methylguanosine-3'-phosphate
  modified_base 6: mod_base = OTHER; note = 2'-O-methylcytidine-3'-phosphate
  modified_base 8: mod_base = OTHER; note = 2'-O-methylguanosine-3'-phosphate
  modified_base 9: mod_base = OTHER; note = 2'-O-methyladenosine-3'-phosphate
  modified_base 10: mod_base = OTHER; note = 2'-O-methyladenosine-3'-phosphate
  modified_base 11: mod_base = OTHER; note = 2'-O-methylguanosine-3'-phosphate
  modified_base 13: mod_base = OTHER; note = 2'-O-methylguanosine-3'-phosphate
  modified_base 14: mod_base = OTHER; note = 2'-fluoroguanosine-3'-phosphate
  modified_base 15: mod_base = OTHER; note = 2'-O-methyladenosine-3'-phosphate
  modified_base 16: mod_base = OTHER; note = 2'-O-methylguanosine-3'-phosphate
  modified_base 17: mod_base = OTHER; note = 2'-O-methyluridine-3'-phosphate
  modified_base 18: mod_base = OTHER; note = 2'-O-methylcytidine-3'-phosphate
  modified_base 19: mod_base = OTHER; note = 2'-O-methyluridine-3'-phosphate
  modified_base 20: mod_base = OTHER; note = 2'-O-methylguanosine-3'-phosphate
  modified_base 21: mod_base = OTHER; note = 2'-O-methyluridine-3'-phosphorothioate
  modified_base 22: mod_base = OTHER; note = 2'-O-methylguanosine-3'-phosphorothioate
  modified_base 23: mod_base = OTHER; note = 2'-O-methyladenosine-3'-phosphate
  misc_feature 1: note = RNA
  misc_feature 2: note = DNA
  misc_feature 3..4: note = RNA
  misc_feature 5: note = DNA
  misc_feature 6: note = RNA
  misc_feature 7: note = DNA
  misc_feature 8..11: note = RNA
  misc_feature 12: note = DNA
  misc_feature 13..23: note = RNA
ataggctgaagtggagtctgtga

SEQ ID NO: 7374 - DNA, 23 bp, synthetic construct
  source 1..23: mol_type = other DNA
  modified_base 1: mod_base = OTHER; note = 2'-O-methyladenosine-3'-phosphorothioate
  modified_base 2: mod_base = OTHER; note = 2'-deoxyguanosine-3'-phosphorothioate
  modified_base 3: mod_base = OTHER; note = 2'-O-methyluridine-3'-phosphate
  modified_base 4: mod_base = OTHER; note = 2'-O-methyladenosine-3'-phosphate
  modified_base 6: mod_base = OTHER; note = 2'-O-methylguanosine-3'-phosphate
  modified_base 8: mod_base = OTHER; note = 2'-O-methyluridine-3'-phosphate
  modified_base 9: mod_base = OTHER; note = 2'-O-methylguanosine-3'-phosphate
  modified_base 10: mod_base = OTHER; note = 2'-O-methyladenosine-3'-phosphate
  modified_base 11: mod_base = OTHER; note = 2'-O-methyladenosine-3'-phosphate
  modified_base 13: mod_base = OTHER; note = 2'-O-methyluridine-3'-phosphate
  modified_base 14: mod_base = OTHER; note = 2'-fluoroguanosine-3'-phosphate
  modified_base 15: mod_base = OTHER; note = 2'-O-methylguanosine-3'-phosphate
  modified_base 16: mod_base = OTHER; note = 2'-O-methyladenosine-3'-phosphate
  modified_base 17: mod_base = OTHER; note = 2'-O-methylguanosine-3'-phosphate
  modified_base 18: mod_base = OTHER; note = 2'-O-methyluridine-3'-phosphate
  modified_base 19: mod_base = OTHER; note = 2'-O-methylcytidine-3'-phosphate
  modified_base 20: mod_base = OTHER; note = 2'-O-methyluridine-3'-phosphate
  modified_base 21: mod_base = OTHER; note = 2'-O-methylguanosine-3'-phosphorothioate
  modified_base 22: mod_base = OTHER; note = 2'-O-methyluridine-3'-phosphorothioate
  modified_base 23: mod_base = OTHER; note = 2'-O-methylguanosine-3'-phosphate
  misc_feature 1: note = RNA
  misc_feature 2: note = DNA
  misc_feature 3..4: note = RNA
  misc_feature 5: note = DNA
  misc_feature 6: note = RNA
  misc_feature 7: note = DNA
  misc_feature 8..11: note = RNA
  misc_feature 12: note = DNA
  misc_feature 13..23: note = RNA
agtaggctgaagtggagtctgtg

SEQ ID NO: 7375 - DNA, 23 bp, synthetic construct
  source 1..23: mol_type = other DNA
  modified_base 1: mod_base = OTHER; note = 2'-O-methyladenosine-3'-phosphorothioate
  modified_base 2: mod_base = OTHER; note = 2'-deoxythimidine-3'-phosphorothioate
  modified_base 3: mod_base = OTHER; note = 2'-O-methylguanosine-3'-phosphate
  modified_base 4: mod_base = OTHER; note = 2'-O-methyluridine-3'-phosphate
  modified_base 6: mod_base = OTHER; note = 2'-O-methylguanosine-3'-phosphate
  modified_base 8: mod_base = OTHER; note = 2'-O-methylcytidine-3'-phosphate
  modified_base 9: mod_base = OTHER; note = 2'-O-methyluridine-3'-phosphate
  modified_base 10: mod_base = OTHER; note = 2'-O-methylguanosine-3'-phosphate
  modified_base 11: mod_base = OTHER; note = 2'-O-methyladenosine-3'-phosphate
  modified_base 13: mod_base = OTHER; note = 2'-O-methylguanosine-3'-phosphate
  modified_base 14: mod_base = OTHER; note = 2'-fluorouridine-3'-phosphate
  modified_base 15: mod_base = OTHER; note = 2'-O-methylguanosine-3'-phosphate
  modified_base 16: mod_base = OTHER; note = 2'-O-methylguanosine-3'-phosphate
  modified_base 17: mod_base = OTHER; note = 2'-O-methyladenosine-3'-phosphate
  modified_base 18: mod_base = OTHER; note = 2'-O-methylguanosine-3'-phosphate
  modified_base 19: mod_base = OTHER; note = 2'-O-methyluridine-3'-phosphate
  modified_base 20: mod_base = OTHER; note = 2'-O-methylcytidine-3'-phosphate
  modified_base 21: mod_base = OTHER; note = 2'-O-methyluridine-3'-phosphorothioate
  modified_base 22: mod_base = OTHER; note = 2'-O-methylguanosine-3'-phosphorothioate
  modified_base 23: mod_base = OTHER; note = 2'-O-methyluridine-3'-phosphate
  misc_feature 1: note = RNA
  misc_feature 2: note = DNA
  misc_feature 3..4: note = RNA
  misc_feature 5: note = DNA
  misc_feature 6: note = RNA
  misc_feature 7: note = DNA
  misc_feature 8..11: note = RNA
  misc_feature 12: note = DNA
  misc_feature 13..23: note = RNA
atgtaggctgaagtggagtctgt

SEQ ID NO: 7376 - DNA, 23 bp, synthetic construct
  source 1..23: mol_type = other DNA
  modified_base 1: mod_base = OTHER; note = 2'-O-methyladenosine-3'-phosphorothioate
  modified_base 2: mod_base = OTHER; note = 2'-deoxycytidine-3'-phosphorothioate
  modified_base 3: mod_base = OTHER; note = 2'-O-methyluridine-3'-phosphate
  modified_base 4: mod_base = OTHER; note = 2'-O-methylguanosine-3'-phosphate
  modified_base 6: mod_base = OTHER; note = 2'-O-methyladenosine-3'-phosphate
  modified_base 8: mod_base = OTHER; note = 2'-O-methylguanosine-3'-phosphate
  modified_base 9: mod_base = OTHER; note = 2'-O-methylcytidine-3'-phosphate
  modified_base 10: mod_base = OTHER; note = 2'-O-methyluridine-3'-phosphate
  modified_base 11: mod_base = OTHER; note = 2'-O-methylguanosine-3'-phosphate
  modified_base 13: mod_base = OTHER; note = 2'-O-methyladenosine-3'-phosphate
  modified_base 14: mod_base = OTHER; note = 2'-fluoroguanosine-3'-phosphate
  modified_base 15: mod_base = OTHER; note = 2'-O-methyluridine-3'-phosphate
  modified_base 16: mod_base = OTHER; note = 2'-O-methylguanosine-3'-phosphate
  modified_base 17: mod_base = OTHER; note = 2'-O-methylguanosine-3'-phosphate
  modified_base 18: mod_base = OTHER; note = 2'-O-methyladenosine-3'-phosphate
  modified_base 19: mod_base = OTHER; note = 2'-O-methylguanosine-3'-phosphate
  modified_base 20: mod_base = OTHER; note = 2'-O-methyluridine-3'-phosphate
  modified_base 21: mod_base = OTHER; note = 2'-O-methylcytidine-3'-phosphorothioate
  modified_base 22: mod_base = OTHER; note = 2'-O-methyluridine-3'-phosphorothioate
  modified_base 23: mod_base = OTHER; note = 2'-O-methylguanosine-3'-phosphate
  misc_feature 1: note = RNA
  misc_feature 2: note = DNA
  misc_feature 3..4: note = RNA
  misc_feature 5: note = DNA
  misc_feature 6: note = RNA
  misc_feature 7: note = DNA
  misc_feature 8..11: note = RNA
  misc_feature 12: note = DNA
  misc_feature 13..23: note = RNA
actgtaggctgaagtggagtctg

SEQ ID NO: 7377 - DNA, 23 bp, synthetic construct
  source 1..23: mol_type = other DNA
  modified_base 1: mod_base = OTHER; note = 2'-O-methyladenosine-3'-phosphorothioate
  modified_base 2: mod_base = OTHER; note = 2'-deoxyguanosine-3'-phosphorothioate
  modified_base 3: mod_base = OTHER; note = 2'-O-methylcytidine-3'-phosphate
  modified_base 4: mod_base = OTHER; note = 2'-O-methyluridine-3'-phosphate
  modified_base 6: mod_base = OTHER; note = 2'-O-methyluridine-3'-phosphate
  modified_base 8: mod_base = OTHER; note = 2'-O-methylguanosine-3'-phosphate
  modified_base 9: mod_base = OTHER; note = 2'-O-methylguanosine-3'-phosphate
  modified_base 10: mod_base = OTHER; note = 2'-O-methylcytidine-3'-phosphate
  modified_base 11: mod_base = OTHER; note = 2'-O-methyluridine-3'-phosphate
  modified_base 13: mod_base = OTHER; note = 2'-O-methyladenosine-3'-phosphate
  modified_base 14: mod_base = OTHER; note = 2'-fluoroadenosine-3'-phosphate
  modified_base 15: mod_base = OTHER; note = 2'-O-methylguanosine-3'-phosphate
  modified_base 16: mod_base = OTHER; note = 2'-O-methyluridine-3'-phosphate
  modified_base 17: mod_base = OTHER; note = 2'-O-methylguanosine-3'-phosphate
  modified_base 18: mod_base = OTHER; note = 2'-O-methylguanosine-3'-phosphate
  modified_base 19: mod_base = OTHER; note = 2'-O-methyladenosine-3'-phosphate
  modified_base 20: mod_base = OTHER; note = 2'-O-methylguanosine-3'-phosphate
  modified_base 21: mod_base = OTHER; note = 2'-O-methyluridine-3'-phosphorothioate
  modified_base 22: mod_base = OTHER; note = 2'-O-methylcytidine-3'-phosphorothioate
  modified_base 23: mod_base = OTHER; note = 2'-O-methyluridine-3'-phosphate
  misc_feature 1: note = RNA
  misc_feature 2: note = DNA
  misc_feature 3..4: note = RNA
  misc_feature 5: note = DNA
  misc_feature 6: note = RNA
  misc_feature 7: note = DNA
  misc_feature 8..11: note = RNA
  misc_feature 12: note = DNA
  misc_feature 13..23: note = RNA
agctgtaggctgaagtggagtct

SEQ ID NO: 7378 - DNA, 23 bp, synthetic construct
  source 1..23: mol_type = other DNA
  modified_base 1: mod_base = OTHER; note = 2'-O-methyladenosine-3'-phosphorothioate
  modified_base 2: mod_base = OTHER; note = 2'-deoxyadenosine-3'-phosphorothioate
  modified_base 3: mod_base = OTHER; note = 2'-O-methylguanosine-3'-phosphate
  modified_base 4: mod_base = OTHER; note = 2'-O-methylcytidine-3'-phosphate
  modified_base 6: mod_base = OTHER; note = 2'-O-methylguanosine-3'-phosphate
  modified_base 8: mod_base = OTHER; note = 2'-O-methyladenosine-3'-phosphate
  modified_base 9: mod_base = OTHER; note = 2'-O-methylguanosine-3'-phosphate
  modified_base 10: mod_base = OTHER; note = 2'-O-methylguanosine-3'-phosphate
  modified_base 11: mod_base = OTHER; note = 2'-O-methylcytidine-3'-phosphate
  modified_base 13: mod_base = OTHER; note = 2'-O-methylguanosine-3'-phosphate
  modified_base 14: mod_base = OTHER; note = 2'-fluoroadenosine-3'-phosphate
  modified_base 15: mod_base = OTHER; note = 2'-O-methyladenosine-3'-phosphate
  modified_base 16: mod_base = OTHER; note = 2'-O-methylguanosine-3'-phosphate
  modified_base 17: mod_base = OTHER; note = 2'-O-methyluridine-3'-phosphate
  modified_base 18: mod_base = OTHER; note = 2'-O-methylguanosine-3'-phosphate
  modified_base 19: mod_base = OTHER; note = 2'-O-methylguanosine-3'-phosphate
  modified_base 20: mod_base = OTHER; note = 2'-O-methyladenosine-3'-phosphate
  modified_base 21: mod_base = OTHER; note = 2'-O-methylguanosine-3'-phosphorothioate
  modified_base 22: mod_base = OTHER; note = 2'-O-methyluridine-3'-phosphorothioate
  modified_base 23: mod_base = OTHER; note = 2'-O-methylcytidine-3'-phosphate
  misc_feature 1: note = RNA
  misc_feature 2: note = DNA
  misc_feature 3..4: note = RNA
  misc_feature 5: note = DNA
  misc_feature 6: note = RNA
  misc_feature 7: note = DNA
  misc_feature 8..11: note = RNA
  misc_feature 12: note = DNA
  misc_feature 13..23: note = RNA
aagctgtaggctgaagtggagtc

SEQ ID NO: 7379 - DNA, 23 bp, synthetic construct
  source 1..23: mol_type = other DNA
  modified_base 1: mod_base = OTHER; note = 2'-O-methyladenosine-3'-phosphorothioate
  modified_base 2: mod_base = OTHER; note = 2'-deoxyguanosine-3'-phosphorothioate
  modified_base 3: mod_base = OTHER; note = 2'-O-methyladenosine-3'-phosphate
  modified_base 4: mod_base = OTHER; note = 2'-O-methylguanosine-3'-phosphate
  modified_base 6: mod_base = OTHER; note = 2'-O-methyluridine-3'-phosphate
  modified_base 8: mod_base = OTHER; note = 2'-O-methyluridine-3'-phosphate
  modified_base 9: mod_base = OTHER; note = 2'-O-methyladenosine-3'-phosphate
  modified_base 10: mod_base = OTHER; note = 2'-O-methylguanosine-3'-phosphate
  modified_base 11: mod_base = OTHER; note = 2'-O-methylguanosine-3'-phosphate
  modified_base 13: mod_base = OTHER; note = 2'-O-methyluridine-3'-phosphate
  modified_base 14: mod_base = OTHER; note = 2'-fluoroguanosine-3'-phosphate
  modified_base 15: mod_base = OTHER; note = 2'-O-methyladenosine-3'-phosphate
  modified_base 16: mod_base = OTHER; note = 2'-O-methyladenosine-3'-phosphate
  modified_base 17: mod_base = OTHER; note = 2'-O-methylguanosine-3'-phosphate
  modified_base 18: mod_base = OTHER; note = 2'-O-methyluridine-3'-phosphate
  modified_base 19: mod_base = OTHER; note = 2'-O-methylguanosine-3'-phosphate
  modified_base 20: mod_base = OTHER; note = 2'-O-methylguanosine-3'-phosphate
  modified_base 21: mod_base = OTHER; note = 2'-O-methyladenosine-3'-phosphorothioate
  modified_base 22: mod_base = OTHER; note = 2'-O-methylguanosine-3'-phosphorothioate
  modified_base 23: mod_base = OTHER; note = 2'-O-methyluridine-3'-phosphate
  misc_feature 1: note = RNA
  misc_feature 2: note = DNA
  misc_feature 3..4: note = RNA
  misc_feature 5: note = DNA
  misc_feature 6: note = RNA
  misc_feature 7: note = DNA
  misc_feature 8..11: note = RNA
  misc_feature 12: note = DNA
  misc_feature 13..23: note = RNA
agagctgtaggctgaagtggagt

SEQ ID NO: 7380 - DNA, 23 bp, synthetic construct
  source 1..23: mol_type = other DNA
  modified_base 1: mod_base = OTHER; note = 2'-O-methyladenosine-3'-phosphorothioate
  modified_base 2: mod_base = OTHER; note = 2'-deoxyguanosine-3'-phosphorothioate
  modified_base 3: mod_base = OTHER; note = 2'-O-methylguanosine-3'-phosphate
  modified_base 4: mod_base = OTHER; note = 2'-O-methyladenosine-3'-phosphate
  modified_base 6: mod_base = OTHER; note = 2'-O-methylcytidine-3'-phosphate
  modified_base 8: mod_base = OTHER; note = 2'-O-methylguanosine-3'-phosphate
  modified_base 9: mod_base = OTHER; note = 2'-O-methyluridine-3'-phosphate
  modified_base 10: mod_base = OTHER; note = 2'-O-methyladenosine-3'-phosphate
  modified_base 11: mod_base = OTHER; note = 2'-O-methylguanosine-3'-phosphate
  modified_base 13: mod_base = OTHER; note = 2'-O-methylcytidine-3'-phosphate
  modified_base 14: mod_base = OTHER; note = 2'-fluorouridine-3'-phosphate
  modified_base 15: mod_base = OTHER; note = 2'-O-methylguanosine-3'-phosphate
  modified_base 16: mod_base = OTHER; note = 2'-O-methyladenosine-3'-phosphate
  modified_base 17: mod_base = OTHER; note = 2'-O-methyladenosine-3'-phosphate
  modified_base 18: mod_base = OTHER; note = 2'-O-methylguanosine-3'-phosphate
  modified_base 19: mod_base = OTHER; note = 2'-O-methyluridine-3'-phosphate
  modified_base 20: mod_base = OTHER; note = 2'-O-methylguanosine-3'-phosphate
  modified_base 21: mod_base = OTHER; note = 2'-O-methylguanosine-3'-phosphorothioate
  modified_base 22: mod_base = OTHER; note = 2'-O-methyladenosine-3'-phosphorothioate
  modified_base 23: mod_base = OTHER; note = 2'-O-methylguanosine-3'-phosphate
  misc_feature 1: note = RNA
  misc_feature 2: note = DNA
  misc_feature 3..4: note = RNA
  misc_feature 5: note = DNA
  misc_feature 6: note = RNA
  misc_feature 7: note = DNA
  misc_feature 8..11: note = RNA
  misc_feature 12: note = DNA
  misc_feature 13..23: note = RNA
aggagctgtaggctgaagtggag

SEQ ID NO: 7381 - DNA, 23 bp, synthetic construct
  source 1..23: mol_type = other DNA
  modified_base 1: mod_base = OTHER; note = 2'-O-methyladenosine-3'-phosphorothioate
  modified_base 2: mod_base = OTHER; note = 2'-deoxyguanosine-3'-phosphorothioate
  modified_base 3: mod_base = OTHER; note = 2'-O-methylguanosine-3'-phosphate
  modified_base 4: mod_base = OTHER; note = 2'-O-methylguanosine-3'-phosphate
  modified_base 6: mod_base = OTHER; note = 2'-O-methylguanosine-3'-phosphate
  modified_base 8: mod_base = OTHER; note = 2'-O-methyluridine-3'-phosphate
  modified_base 9: mod_base = OTHER; note = 2'-O-methylguanosine-3'-phosphate
  modified_base 10: mod_base = OTHER; note = 2'-O-methyluridine-3'-phosphate
  modified_base 11: mod_base = OTHER; note = 2'-O-methyladenosine-3'-phosphate
  modified_base 13: mod_base = OTHER; note = 2'-O-methylguanosine-3'-phosphate
  modified_base 14: mod_base = OTHER; note = 2'-fluorocytidine-3'-phosphate
  modified_base 15: mod_base = OTHER; note = 2'-O-methyluridine-3'-phosphate
  modified_base 16: mod_base = OTHER; note = 2'-O-methylguanosine-3'-phosphate
  modified_base 17: mod_base = OTHER; note = 2'-O-methyladenosine-3'-phosphate
  modified_base 18: mod_base = OTHER; note = 2'-O-methyladenosine-3'-phosphate
  modified_base 19: mod_base = OTHER; note = 2'-O-methylguanosine-3'-phosphate
  modified_base 20: mod_base = OTHER; note = 2'-O-methyluridine-3'-phosphate
  modified_base 21: mod_base = OTHER; note = 2'-O-methylguanosine-3'-phosphorothioate
  modified_base 22: mod_base = OTHER; note = 2'-O-methylguanosine-3'-phosphorothioate
  modified_base 23: mod_base = OTHER; note = 2'-O-methyladenosine-3'-phosphate
  misc_feature 1: note = RNA
  misc_feature 2: note = DNA
  misc_feature 3..4: note = RNA
  misc_feature 5: note = DNA
  misc_feature 6: note = RNA
  misc_feature 7: note = DNA
  misc_feature 8..11: note = RNA
  misc_feature 12: note = DNA
  misc_feature 13..23: note = RNA
agggagctgtaggctgaagtgga

SEQ ID NO: 7382 - DNA, 23 bp, synthetic construct
  source 1..23: mol_type = other DNA
  modified_base 1: mod_base = OTHER; note = 2'-O-methyladenosine-3'-phosphorothioate
  modified_base 2: mod_base = OTHER; note = 2'-deoxyadenosine-3'-phosphorothioate
  modified_base 3: mod_base = OTHER; note = 2'-O-methylguanosine-3'-phosphate
  modified_base 4: mod_base = OTHER; note = 2'-O-methylguanosine-3'-phosphate
  modified_base 6: mod_base = OTHER; note = 2'-O-methyladenosine-3'-phosphate
  modified_base 8: mod_base = OTHER; note = 2'-O-methylcytidine-3'-phosphate
  modified_base 9: mod_base = OTHER; note = 2'-O-methyluridine-3'-phosphate
  modified_base 10: mod_base = OTHER; note = 2'-O-methylguanosine-3'-phosphate
  modified_base 11: mod_base = OTHER; note = 2'-O-methyluridine-3'-phosphate
  modified_base 13: mod_base = OTHER; note = 2'-O-methylguanosine-3'-phosphate
  modified_base 14: mod_base = OTHER; note = 2'-fluoroguanosine-3'-phosphate
  modified_base 15: mod_base = OTHER; note = 2'-O-methylcytidine-3'-phosphate
  modified_base 16: mod_base = OTHER; note = 2'-O-methyluridine-3'-phosphate
  modified_base 17: mod_base = OTHER; note = 2'-O-methylguanosine-3'-phosphate
  modified_base 18: mod_base = OTHER; note = 2'-O-methyladenosine-3'-phosphate
  modified_base 19: mod_base = OTHER; note = 2'-O-methyladenosine-3'-phosphate
  modified_base 20: mod_base = OTHER; note = 2'-O-methylguanosine-3'-phosphate
  modified_base 21: mod_base = OTHER; note = 2'-O-methyluridine-3'-phosphorothioate
  modified_base 22: mod_base = OTHER; note = 2'-O-methylguanosine-3'-phosphorothioate
  modified_base 23: mod_base = OTHER; note = 2'-O-methylguanosine-3'-phosphate
  misc_feature 1: note = RNA
  misc_feature 2: note = DNA
  misc_feature 3..4: note = RNA
  misc_feature 5: note = DNA
  misc_feature 6: note = RNA
  misc_feature 7: note = DNA
  misc_feature 8..11: note = RNA
  misc_feature 12: note = DNA
  misc_feature 13..23: note = RNA
aagggagctgtaggctgaagtgg

SEQ ID NO: 7383 - DNA, 23 bp, synthetic construct
  source 1..23: mol_type = other DNA
  modified_base 1: mod_base = OTHER; note = 2'-O-methyladenosine-3'-phosphorothioate
  modified_base 2: mod_base = OTHER; note = 2'-deoxyadenosine-3'-phosphorothioate
  modified_base 3: mod_base = OTHER; note = 2'-O-methylguanosine-3'-phosphate
  modified_base 4: mod_base = OTHER; note = 2'-O-methylcytidine-3'-phosphate
  modified_base 6: mod_base = OTHER; note = 2'-O-methylguanosine-3'-phosphate
  modified_base 8: mod_base = OTHER; note = 2'-O-methylguanosine-3'-phosphate
  modified_base 9: mod_base = OTHER; note = 2'-O-methyladenosine-3'-phosphate
  modified_base 10: mod_base = OTHER; note = 2'-O-methylguanosine-3'-phosphate
  modified_base 11: mod_base = OTHER; note = 2'-O-methylcytidine-3'-phosphate
  modified_base 13: mod_base = OTHER; note = 2'-O-methylguanosine-3'-phosphate
  modified_base 14: mod_base = OTHER; note = 2'-fluorouridine-3'-phosphate
  modified_base 15: mod_base = OTHER; note = 2'-O-methyladenosine-3'-phosphate
  modified_base 16: mod_base = OTHER; note = 2'-O-methylguanosine-3'-phosphate
  modified_base 17: mod_base = OTHER; note = 2'-O-methylguanosine-3'-phosphate
  modified_base 18: mod_base = OTHER; note = 2'-O-methylcytidine-3'-phosphate
  modified_base 19: mod_base = OTHER; note = 2'-O-methyluridine-3'-phosphate
  modified_base 20: mod_base = OTHER; note = 2'-O-methylguanosine-3'-phosphate
  modified_base 21: mod_base = OTHER; note = 2'-O-methyladenosine-3'-phosphorothioate
  modified_base 22: mod_base = OTHER; note = 2'-O-methyladenosine-3'-phosphorothioate
  modified_base 23: mod_base = OTHER; note = 2'-O-methylguanosine-3'-phosphate
  misc_feature 1: note = RNA
  misc_feature 2: note = DNA
  misc_feature 3..4: note = RNA
  misc_feature 5: note = DNA
  misc_feature 6: note = RNA
  misc_feature 7: note = DNA
  misc_feature 8..11: note = RNA
  misc_feature 12: note = DNA
  misc_feature 13..23: note = RNA
aagcagggagctgtaggctgaag

SEQ ID NO: 7384 - DNA, 23 bp, synthetic construct
  source 1..23: mol_type = other DNA
  modified_base 1: mod_base = OTHER; note = 2'-O-methyladenosine-3'-phosphorothioate
  modified_base 2: mod_base = OTHER; note = 2'-deoxyadenosine-3'-phosphorothioate
  modified_base 3: mod_base = OTHER; note = 2'-O-methylguanosine-3'-phosphate
  modified_base 4: mod_base = OTHER; note = 2'-O-methylguanosine-3'-phosphate
  modified_base 6: mod_base = OTHER; note = 2'-O-methylguanosine-3'-phosphate
  modified_base 8: mod_base = OTHER; note = 2'-O-methylguanosine-3'-phosphate
  modified_base 9: mod_base = OTHER; note = 2'-O-methylcytidine-3'-phosphate
  modified_base 10: mod_base = OTHER; note = 2'-O-methyladenosine-3'-phosphate
  modified_base 11: mod_base = OTHER; note = 2'-O-methyluridine-3'-phosphate
  modified_base 13: mod_base = OTHER; note = 2'-O-methylguanosine-3'-phosphate
  modified_base 14: mod_base = OTHER; note = 2'-fluorouridine-3'-phosphate
  modified_base 15: mod_base = OTHER; note = 2'-O-methyladenosine-3'-phosphate
  modified_base 16: mod_base = OTHER; note = 2'-O-methylcytidine-3'-phosphate
  modified_base 17: mod_base = OTHER; note = 2'-O-methyladenosine-3'-phosphate
  modified_base 18: mod_base = OTHER; note = 2'-O-methylguanosine-3'-phosphate
  modified_base 19: mod_base = OTHER; note = 2'-O-methylguanosine-3'-phosphate
  modified_base 20: mod_base = OTHER; note = 2'-O-methyluridine-3'-phosphate
  modified_base 21: mod_base = OTHER; note = 2'-O-methylguanosine-3'-phosphorothioate
  modified_base 22: mod_base = OTHER; note = 2'-O-methylguanosine-3'-phosphorothioate
  modified_base 23: mod_base = OTHER; note = 2'-O-methyluridine-3'-phosphate
  misc_feature 1: note = RNA
  misc_feature 2: note = DNA
  misc_feature 3..4: note = RNA
  misc_feature 5: note = DNA
  misc_feature 6: note = RNA
  misc_feature 7: note = DNA
  misc_feature 8..11: note = RNA
  misc_feature 12: note = DNA
  misc_feature 13..23: note = RNA
aaggcgggcatggtacaggtggt

SEQ ID NO: 7385 - DNA, 23 bp, synthetic construct
  source 1..23: mol_type = other DNA
  modified_base 1: mod_base = OTHER; note = 2'-O-methyladenosine-3'-phosphorothioate
  modified_base 2: mod_base = OTHER; note = 2'-deoxyadenosine-3'-phosphorothioate
  modified_base 3: mod_base = OTHER; note = 2'-O-methylcytidine-3'-phosphate
  modified_base 4: mod_base = OTHER; note = 2'-O-methyladenosine-3'-phosphate
  modified_base 6: mod_base = OTHER; note = 2'-O-methylguanosine-3'-phosphate
  modified_base 8: mod_base = OTHER; note = 2'-O-methylguanosine-3'-phosphate
  modified_base 9: mod_base = OTHER; note = 2'-O-methylguanosine-3'-phosphate
  modified_base 10: mod_base = OTHER; note = 2'-O-methylguanosine-3'-phosphate
  modified_base 11: mod_base = OTHER; note = 2'-O-methylcytidine-3'-phosphate
  modified_base 13: mod_base = OTHER; note = 2'-O-methyluridine-3'-phosphate
  modified_base 14: mod_base = OTHER; note = 2'-fluoroguanosine-3'-phosphate
  modified_base 15: mod_base = OTHER; note = 2'-O-methylguanosine-3'-phosphate
  modified_base 16: mod_base = OTHER; note = 2'-O-methyluridine-3'-phosphate
  modified_base 17: mod_base = OTHER; note = 2'-O-methyladenosine-3'-phosphate
  modified_base 18: mod_base = OTHER; note = 2'-O-methylcytidine-3'-phosphate
  modified_base 19: mod_base = OTHER; note = 2'-O-methyladenosine-3'-phosphate
  modified_base 20: mod_base = OTHER; note = 2'-O-methylguanosine-3'-phosphate
  modified_base 21: mod_base = OTHER; note = 2'-O-methylguanosine-3'-phosphorothioate
  modified_base 22: mod_base = OTHER; note = 2'-O-methyluridine-3'-phosphorothioate
  modified_base 23: mod_base = OTHER; note = 2'-O-methylguanosine-3'-phosphate
  misc_feature 1: note = RNA
  misc_feature 2: note = DNA
  misc_feature 3..4: note = RNA
  misc_feature 5: note = DNA
  misc_feature 6: note = RNA
  misc_feature 7: note = DNA
  misc_feature 8..11: note = RNA
  misc_feature 12: note = DNA
  misc_feature 13..23: note = RNA
aacaggcgggcatggtacaggtg

SEQ ID NO: 7386 - DNA, 23 bp, synthetic construct
  source 1..23: mol_type = other DNA
  modified_base 1: mod_base = OTHER; note = 2'-O-methyladenosine-3'-phosphorothioate
  modified_base 2: mod_base = OTHER; note = 2'-deoxycytidine-3'-phosphorothioate
  modified_base 3: mod_base = OTHER; note = 2'-O-methyladenosine-3'-phosphate
  modified_base 4: mod_base = OTHER; note = 2'-O-methylcytidine-3'-phosphate
  modified_base 6: mod_base = OTHER; note = 2'-O-methylguanosine-3'-phosphate
  modified_base 8: mod_base = OTHER; note = 2'-O-methylcytidine-3'-phosphate
  modified_base 9: mod_base = OTHER; note = 2'-O-methylguanosine-3'-phosphate
  modified_base 10: mod_base = OTHER; note = 2'-O-methylguanosine-3'-phosphate
  modified_base 11: mod_base = OTHER; note = 2'-O-methylguanosine-3'-phosphate
  modified_base 13: mod_base = OTHER; note = 2'-O-methyladenosine-3'-phosphate
  modified_base 14: mod_base = OTHER; note = 2'-fluorouridine-3'-phosphate
  modified_base 15: mod_base = OTHER; note = 2'-O-methylguanosine-3'-phosphate
  modified_base 16: mod_base = OTHER; note = 2'-O-methylguanosine-3'-phosphate
  modified_base 17: mod_base = OTHER; note = 2'-O-methyluridine-3'-phosphate
  modified_base 18: mod_base = OTHER; note = 2'-O-methyladenosine-3'-phosphate
  modified_base 19: mod_base = OTHER; note = 2'-O-methylcytidine-3'-phosphate
  modified_base 20: mod_base = OTHER; note = 2'-O-methyladenosine-3'-phosphate
  modified_base 21: mod_base = OTHER; note = 2'-O-methylguanosine-3'-phosphorothioate
  modified_base 22: mod_base = OTHER; note = 2'-O-methylguanosine-3'-phosphorothioate
  modified_base 23: mod_base = OTHER; note = 2'-O-methyluridine-3'-phosphate
  misc_feature 1: note = RNA
  misc_feature 2: note = DNA
  misc_feature 3..4: note = RNA
  misc_feature 5: note = DNA
  misc_feature 6: note = RNA
  misc_feature 7: note = DNA
  misc_feature 8..11: note = RNA
  misc_feature 12: note = DNA
  misc_feature 13..23: note = RNA
acacaggcgggcatggtacaggt

SEQ ID NO: 7387 - DNA, 23 bp, synthetic construct
  source 1..23: mol_type = other DNA
  modified_base 1: mod_base = OTHER; note = 2'-O-methyladenosine-3'-phosphorothioate
  modified_base 2: mod_base = OTHER; note = 2'-deoxyadenosine-3'-phosphorothioate
  modified_base 3: mod_base = OTHER; note = 2'-O-methylguanosine-3'-phosphate
  modified_base 4: mod_base = OTHER; note = 2'-O-methylcytidine-3'-phosphate
  modified_base 6: mod_base = OTHER; note = 2'-O-methyladenosine-3'-phosphate
  modified_base 8: mod_base = OTHER; note = 2'-O-methyladenosine-3'-phosphate
  modified_base 9: mod_base = OTHER; note = 2'-O-methylguanosine-3'-phosphate
  modified_base 10: mod_base = OTHER; note = 2'-O-methylguanosine-3'-phosphate
  modified_base 11: mod_base = OTHER; note = 2'-O-methylcytidine-3'-phosphate
  modified_base 13: mod_base = OTHER; note = 2'-O-methylguanosine-3'-phosphate
  modified_base 14: mod_base = OTHER; note = 2'-fluoroguanosine-3'-phosphate
  modified_base 15: mod_base = OTHER; note = 2'-O-methylcytidine-3'-phosphate
  modified_base 16: mod_base = OTHER; note = 2'-O-methyladenosine-3'-phosphate
  modified_base 17: mod_base = OTHER; note = 2'-O-methyluridine-3'-phosphate
  modified_base 18: mod_base = OTHER; note = 2'-O-methylguanosine-3'-phosphate
  modified_base 19: mod_base = OTHER; note = 2'-O-methylguanosine-3'-phosphate
  modified_base 20: mod_base = OTHER; note = 2'-O-methyluridine-3'-phosphate
  modified_base 21: mod_base = OTHER; note = 2'-O-methyladenosine-3'-phosphorothioate
  modified_base 22: mod_base = OTHER; note = 2'-O-methylcytidine-3'-phosphorothioate
  modified_base 23: mod_base = OTHER; note = 2'-O-methyladenosine-3'-phosphate
  misc_feature 1: note = RNA
  misc_feature 2: note = DNA
  misc_feature 3..4: note = RNA
  misc_feature 5: note = DNA
  misc_feature 6: note = RNA
  misc_feature 7: note = DNA
  misc_feature 8..11: note = RNA
  misc_feature 12: note = DNA
  misc_feature 13..23: note = RNA
aagccacaggcgggcatggtaca

SEQ ID NO: 7388 - DNA, 23 bp, synthetic construct
  source 1..23: mol_type = other DNA
  modified_base 1: mod_base = OTHER; note = 2'-O-methyladenosine-3'-phosphorothioate
  modified_base 2: mod_base = OTHER; note = 2'-deoxyadenosine-3'-phosphorothioate
  modified_base 3: mod_base = OTHER; note = 2'-O-methyladenosine-3'-phosphate
  modified_base 4: mod_base = OTHER; note = 2'-O-methyladenosine-3'-phosphate
  modified_base 6: mod_base = OTHER; note = 2'-O-methyladenosine-3'-phosphate
  modified_base 8: mod_base = OTHER; note = 2'-O-methyluridine-3'-phosphate
  modified_base 9: mod_base = OTHER; note = 2'-O-methylguanosine-3'-phosphate
  modified_base 10: mod_base = OTHER; note = 2'-O-methylcytidine-3'-phosphate
  modified_base 11: mod_base = OTHER; note = 2'-O-methylcytidine-3'-phosphate
  modified_base 13: mod_base = OTHER; note = 2'-O-methylguanosine-3'-phosphate
  modified_base 14: mod_base = OTHER; note = 2'-fluoroguanosine-3'-phosphate
  modified_base 15: mod_base = OTHER; note = 2'-O-methyladenosine-3'-phosphate
  modified_base 16: mod_base = OTHER; note = 2'-O-methyladenosine-3'-phosphate
  modified_base 17: mod_base = OTHER; note = 2'-O-methylguanosine-3'-phosphate
  modified_base 18: mod_base = OTHER; note = 2'-O-methylguanosine-3'-phosphate
  modified_base 19: mod_base = OTHER; note = 2'-O-methylguanosine-3'-phosphate
  modified_base 20: mod_base = OTHER; note = 2'-O-methyluridine-3'-phosphate
  modified_base 21: mod_base = OTHER; note = 2'-O-methylguanosine-3'-phosphorothioate
  modified_base 22: mod_base = OTHER; note = 2'-O-methylguanosine-3'-phosphorothioate
  modified_base 23: mod_base = OTHER; note = 2'-O-methylguanosine-3'-phosphate
  misc_feature 1: note = RNA
  misc_feature 2: note = DNA
  misc_feature 3..4: note = RNA
  misc_feature 5: note = DNA
  misc_feature 6: note = RNA
  misc_feature 7: note = DNA
  misc_feature 8..11: note = RNA
  misc_feature 12: note = DNA
  misc_feature 13..23: note = RNA
aaaagagtgccaggaagggtggg

SEQ ID NO: 7389 - DNA, 23 bp, synthetic construct
  source 1..23: mol_type = other DNA
  modified_base 1: mod_base = OTHER; note = 2'-O-methyladenosine-3'-phosphorothioate
  modified_base 2: mod_base = OTHER; note = 2'-deoxycytidine-3'-phosphorothioate
  modified_base 3: mod_base = OTHER; note = 2'-O-methyladenosine-3'-phosphate
  modified_base 4: mod_base = OTHER; note = 2'-O-methyladenosine-3'-phosphate
  modified_base 6: mod_base = OTHER; note = 2'-O-methylguanosine-3'-phosphate
  modified_base 8: mod_base = OTHER; note = 2'-O-methylguanosine-3'-phosphate
  modified_base 9: mod_base = OTHER; note = 2'-O-methyluridine-3'-phosphate
  modified_base 10: mod_base = OTHER; note = 2'-O-methylguanosine-3'-phosphate
  modified_base 11: mod_base = OTHER; note = 2'-O-methylcytidine-3'-phosphate
  modified_base 13: mod_base = OTHER; note = 2'-O-methyladenosine-3'-phosphate
  modified_base 14: mod_base = OTHER; note = 2'-fluoroguanosine-3'-phosphate
  modified_base 15: mod_base = OTHER; note = 2'-O-methylguanosine-3'-phosphate
  modified_base 16: mod_base = OTHER; note = 2'-O-methyladenosine-3'-phosphate
  modified_base 17: mod_base = OTHER; note = 2'-O-methyladenosine-3'-phosphate
  modified_base 18: mod_base = OTHER; note = 2'-O-methylguanosine-3'-phosphate
  modified_base 19: mod_base = OTHER; note = 2'-O-methylguanosine-3'-phosphate
  modified_base 20: mod_base = OTHER; note = 2'-O-methylguanosine-3'-phosphate
  modified_base 21: mod_base = OTHER; note = 2'-O-methyluridine-3'-phosphorothioate
  modified_base 22: mod_base = OTHER; note = 2'-O-methylguanosine-3'-phosphorothioate
  modified_base 23: mod_base = OTHER; note = 2'-O-methylguanosine-3'-phosphate
  misc_feature 1: note = RNA
  misc_feature 2: note = DNA
  misc_feature 3..4: note = RNA
  misc_feature 5: note = DNA
  misc_feature 6: note = RNA
  misc_feature 7: note = DNA
  misc_feature 8..11: note = RNA
  misc_feature 12: note = DNA
  misc_feature 13..23: note = RNA
acaaagagtgccaggaagggtgg

SEQ ID NO: 7390 - DNA, 23 bp, synthetic construct
  source 1..23: mol_type = other DNA
  modified_base 1: mod_base = OTHER; note = 2'-O-methyladenosine-3'-phosphorothioate
  modified_base 2: mod_base = OTHER; note = 2'-deoxyguanosine-3'-phosphorothioate
  modified_base 3: mod_base = OTHER; note = 2'-O-methylcytidine-3'-phosphate
  modified_base 4: mod_base = OTHER; note = 2'-O-methyladenosine-3'-phosphate
  modified_base 6: mod_base = OTHER; note = 2'-O-methyladenosine-3'-phosphate
  modified_base 8: mod_base = OTHER; note = 2'-O-methyladenosine-3'-phosphate
  modified_base 9: mod_base = OTHER; note = 2'-O-methylguanosine-3'-phosphate
  modified_base 10: mod_base = OTHER; note = 2'-O-methyluridine-3'-phosphate
  modified_base 11: mod_base = OTHER; note = 2'-O-methylguanosine-3'-phosphate
  modified_base 13: mod_base = OTHER; note = 2'-O-methylcytidine-3'-phosphate
  modified_base 14: mod_base = OTHER; note = 2'-fluoroadenosine-3'-phosphate
  modified_base 15: mod_base = OTHER; note = 2'-O-methylguanosine-3'-phosphate
  modified_base 16: mod_base = OTHER; note = 2'-O-methylguanosine-3'-phosphate
  modified_base 17: mod_base = OTHER; note = 2'-O-methyladenosine-3'-phosphate
  modified_base 18: mod_base = OTHER; note = 2'-O-methyladenosine-3'-phosphate
  modified_base 19: mod_base = OTHER; note = 2'-O-methylguanosine-3'-phosphate
  modified_base 20: mod_base = OTHER; note = 2'-O-methylguanosine-3'-phosphate
  modified_base 21: mod_base = OTHER; note = 2'-O-methylguanosine-3'-phosphorothioate
  modified_base 22: mod_base = OTHER; note = 2'-O-methyluridine-3'-phosphorothioate
  modified_base 23: mod_base = OTHER; note = 2'-O-methylguanosine-3'-phosphate
  misc_feature 1: note = RNA
  misc_feature 2: note = DNA
  misc_feature 3..4: note = RNA
  misc_feature 5: note = DNA
  misc_feature 6: note = RNA
  misc_feature 7: note = DNA
  misc_feature 8..11: note = RNA
  misc_feature 12: note = DNA
  misc_feature 13..23: note = RNA
agcaaagagtgccaggaagggtg

SEQ ID NO: 7391 - DNA, 23 bp, synthetic construct
  source 1..23: mol_type = other DNA
  modified_base 1: mod_base = OTHER; note = 2'-O-methyladenosine-3'-phosphorothioate
  modified_base 2: mod_base = OTHER; note = 2'-deoxyadenosine-3'-phosphorothioate
  modified_base 3: mod_base = OTHER; note = 2'-O-methylguanosine-3'-phosphate
  modified_base 4: mod_base = OTHER; note = 2'-O-methylcytidine-3'-phosphate
  modified_base 6: mod_base = OTHER; note = 2'-O-methyladenosine-3'-phosphate
  modified_base 8: mod_base = OTHER; note = 2'-O-methylguanosine-3'-phosphate
  modified_base 9: mod_base = OTHER; note = 2'-O-methyladenosine-3'-phosphate
  modified_base 10: mod_base = OTHER; note = 2'-O-methylguanosine-3'-phosphate
  modified_base 11: mod_base = OTHER; note = 2'-O-methyluridine-3'-phosphate
  modified_base 13: mod_base = OTHER; note = 2'-O-methylcytidine-3'-phosphate
  modified_base 14: mod_base = OTHER; note = 2'-fluorocytidine-3'-phosphate
  modified_base 15: mod_base = OTHER; note = 2'-O-methyladenosine-3'-phosphate
  modified_base 16: mod_base = OTHER; note = 2'-O-methylguanosine-3'-phosphate
  modified_base 17: mod_base = OTHER; note = 2'-O-methylguanosine-3'-phosphate
  modified_base 18: mod_base = OTHER; note = 2'-O-methyladenosine-3'-phosphate
  modified_base 19: mod_base = OTHER; note = 2'-O-methyladenosine-3'-phosphate
  modified_base 20: mod_base = OTHER; note = 2'-O-methylguanosine-3'-phosphate
  modified_base 21: mod_base = OTHER; note = 2'-O-methylguanosine-3'-phosphorothioate
  modified_base 22: mod_base = OTHER; note = 2'-O-methylguanosine-3'-phosphorothioate
  modified_base 23: mod_base = OTHER; note = 2'-O-methyluridine-3'-phosphate
  misc_feature 1: note = RNA
  misc_feature 2: note = DNA
  misc_feature 3..4: note = RNA
  misc_feature 5: note = DNA
  misc_feature 6: note = RNA
  misc_feature 7: note = DNA
  misc_feature 8..11: note = RNA
  misc_feature 12: note = DNA
  misc_feature 13..23: note = RNA
aagcaaagagtgccaggaagggt

SEQ ID NO: 7392 - DNA, 23 bp, synthetic construct
  source 1..23: mol_type = other DNA
  modified_base 1: mod_base = OTHER; note = 2'-O-methyladenosine-3'-phosphorothioate
  modified_base 2: mod_base = OTHER; note = 2'-deoxyadenosine-3'-phosphorothioate
  modified_base 3: mod_base = OTHER; note = 2'-O-methyladenosine-3'-phosphate
  modified_base 4: mod_base = OTHER; note = 2'-O-methylguanosine-3'-phosphate
  modified_base 6: mod_base = OTHER; note = 2'-O-methyladenosine-3'-phosphate
  modified_base 8: mod_base = OTHER; note = 2'-O-methyladenosine-3'-phosphate
  modified_base 9: mod_base = OTHER; note = 2'-O-methylguanosine-3'-phosphate
  modified_base 10: mod_base = OTHER; note = 2'-O-methyladenosine-3'-phosphate
  modified_base 11: mod_base = OTHER; note = 2'-O-methylguanosine-3'-phosphate
  modified_base 13: mod_base = OTHER; note = 2'-O-methylguanosine-3'-phosphate
  modified_base 14: mod_base = OTHER; note = 2'-fluorocytidine-3'-phosphate
  modified_base 15: mod_base = OTHER; note = 2'-O-methylcytidine-3'-phosphate
  modified_base 16: mod_base = OTHER; note = 2'-O-methyladenosine-3'-phosphate
  modified_base 17: mod_base = OTHER; note = 2'-O-methylguanosine-3'-phosphate
  modified_base 18: mod_base = OTHER; note = 2'-O-methylguanosine-3'-phosphate
  modified_base 19: mod_base = OTHER; note = 2'-O-methyladenosine-3'-phosphate
  modified_base 20: mod_base = OTHER; note = 2'-O-methyladenosine-3'-phosphate
  modified_base 21: mod_base = OTHER; note = 2'-O-methylguanosine-3'-phosphorothioate
  modified_base 22: mod_base = OTHER; note = 2'-O-methylguanosine-3'-phosphorothioate
  modified_base 23: mod_base = OTHER; note = 2'-O-methylguanosine-3'-phosphate
  misc_feature 1: note = RNA
  misc_feature 2: note = DNA
  misc_feature 3..4: note = RNA
  misc_feature 5: note = DNA
  misc_feature 6: note = RNA
  misc_feature 7: note = DNA
  misc_feature 8..11: note = RNA
  misc_feature 12: note = DNA
  misc_feature 13..23: note = RNA
aaagcaaagagtgccaggaaggg

SEQ ID NO: 7393 - DNA, 23 bp, synthetic construct
  source 1..23: mol_type = other DNA
  modified_base 1: mod_base = OTHER; note = 2'-O-methyladenosine-3'-phosphorothioate
  modified_base 2: mod_base = OTHER; note = 2'-deoxycytidine-3'-phosphorothioate
  modified_base 3: mod_base = OTHER; note = 2'-O-methyladenosine-3'-phosphate
  modified_base 4: mod_base = OTHER; note = 2'-O-methyladenosine-3'-phosphate
  modified_base 6: mod_base = OTHER; note = 2'-O-methylcytidine-3'-phosphate
  modified_base 8: mod_base = OTHER; note = 2'-O-methyladenosine-3'-phosphate
  modified_base 9: mod_base = OTHER; note = 2'-O-methyladenosine-3'-phosphate
  modified_base 10: mod_base = OTHER; note = 2'-O-methylguanosine-3'-phosphate
  modified_base 11: mod_base = OTHER; note = 2'-O-methyladenosine-3'-phosphate
  modified_base 13: mod_base = OTHER; note = 2'-O-methyluridine-3'-phosphate
  modified_base 14: mod_base = OTHER; note = 2'-fluoroguanosine-3'-phosphate
  modified_base 15: mod_base = OTHER; note = 2'-O-methylcytidine-3'-phosphate
  modified_base 16: mod_base = OTHER; note = 2'-O-methylcytidine-3'-phosphate
  modified_base 17: mod_base = OTHER; note = 2'-O-methyladenosine-3'-phosphate
  modified_base 18: mod_base = OTHER; note = 2'-O-methylguanosine-3'-phosphate
  modified_base 19: mod_base = OTHER; note = 2'-O-methylguanosine-3'-phosphate
  modified_base 20: mod_base = OTHER; note = 2'-O-methyladenosine-3'-phosphate
  modified_base 21: mod_base = OTHER; note = 2'-O-methyladenosine-3'-phosphorothioate
  modified_base 22: mod_base = OTHER; note = 2'-O-methylguanosine-3'-phosphorothioate
  modified_base 23: mod_base = OTHER; note = 2'-O-methylguanosine-3'-phosphate
  misc_feature 1: note = RNA
  misc_feature 2: note = DNA
  misc_feature 3..4: note = RNA
  misc_feature 5: note = DNA
  misc_feature 6: note = RNA
  misc_feature 7: note = DNA
  misc_feature 8..11: note = RNA
  misc_feature 12: note = DNA
  misc_feature 13..23: note = RNA
acaagcaaagagtgccaggaagg

SEQ ID NO: 7394 - DNA, 23 bp, synthetic construct
  source 1..23: mol_type = other DNA
  modified_base 1: mod_base = OTHER; note = 2'-O-methyladenosine-3'-phosphorothioate
  modified_base 2: mod_base = OTHER; note = 2'-deoxythimidine-3'-phosphorothioate
  modified_base 3: mod_base = OTHER; note = 2'-O-methylcytidine-3'-phosphate
  modified_base 4: mod_base = OTHER; note = 2'-O-methyladenosine-3'-phosphate
  modified_base 6: mod_base = OTHER; note = 2'-O-methylguanosine-3'-phosphate
  modified_base 8: mod_base = OTHER; note = 2'-O-methyladenosine-3'-phosphate
  modified_base 9: mod_base = OTHER; note = 2'-O-methyladenosine-3'-phosphate
  modified_base 10: mod_base = OTHER; note = 2'-O-methyladenosine-3'-phosphate
  modified_base 11: mod_base = OTHER; note = 2'-O-methylguanosine-3'-phosphate
  modified_base 13: mod_base = OTHER; note = 2'-O-methylguanosine-3'-phosphate
  modified_base 14: mod_base = OTHER; note = 2'-fluorouridine-3'-phosphate
  modified_base 15: mod_base = OTHER; note = 2'-O-methylguanosine-3'-phosphate
  modified_base 16: mod_base = OTHER; note = 2'-O-methylcytidine-3'-phosphate
  modified_base 17: mod_base = OTHER; note = 2'-O-methylcytidine-3'-phosphate
  modified_base 18: mod_base = OTHER; note = 2'-O-methyladenosine-3'-phosphate
  modified_base 19: mod_base = OTHER; note = 2'-O-methylguanosine-3'-phosphate
  modified_base 20: mod_base = OTHER; note = 2'-O-methylguanosine-3'-phosphate
  modified_base 21: mod_base = OTHER; note = 2'-O-methyladenosine-3'-phosphorothioate
  modified_base 22: mod_base = OTHER; note = 2'-O-methyladenosine-3'-phosphorothioate
  modified_base 23: mod_base = OTHER; note = 2'-O-methylguanosine-3'-phosphate
  misc_feature 1: note = RNA
  misc_feature 2: note = DNA
  misc_feature 3..4: note = RNA
  misc_feature 5: note = DNA
  misc_feature 6: note = RNA
  misc_feature 7: note = DNA
  misc_feature 8..11: note = RNA
  misc_feature 12: note = DNA
  misc_feature 13..23: note = RNA
atcaagcaaagagtgccaggaag

SEQ ID NO: 7395 - DNA, 23 bp, synthetic construct
  source 1..23: mol_type = other DNA
  modified_base 1: mod_base = OTHER; note = 2'-O-methyladenosine-3'-phosphorothioate
  modified_base 2: mod_base = OTHER; note = 2'-deoxycytidine-3'-phosphorothioate
  modified_base 3: mod_base = OTHER; note = 2'-O-methyluridine-3'-phosphate
  modified_base 4: mod_base = OTHER; note = 2'-O-methylcytidine-3'-phosphate
  modified_base 6: mod_base = OTHER; note = 2'-O-methyladenosine-3'-phosphate
  modified_base 8: mod_base = OTHER; note = 2'-O-methylcytidine-3'-phosphate
  modified_base 9: mod_base = OTHER; note = 2'-O-methyladenosine-3'-phosphate
  modified_base 10: mod_base = OTHER; note = 2'-O-methyladenosine-3'-phosphate
  modified_base 11: mod_base = OTHER; note = 2'-O-methyladenosine-3'-phosphate
  modified_base 13: mod_base = OTHER; note = 2'-O-methyladenosine-3'-phosphate
  modified_base 14: mod_base = OTHER; note = 2'-fluoroguanosine-3'-phosphate
  modified_base 15: mod_base = OTHER; note = 2'-O-methyluridine-3'-phosphate
  modified_base 16: mod_base = OTHER; note = 2'-O-methylguanosine-3'-phosphate
  modified_base 17: mod_base = OTHER; note = 2'-O-methylcytidine-3'-phosphate
  modified_base 18: mod_base = OTHER; note = 2'-O-methylcytidine-3'-phosphate
  modified_base 19: mod_base = OTHER; note = 2'-O-methyladenosine-3'-phosphate
  modified_base 20: mod_base = OTHER; note = 2'-O-methylguanosine-3'-phosphate
  modified_base 21: mod_base = OTHER; note = 2'-O-methylguanosine-3'-phosphorothioate
  modified_base 22: mod_base = OTHER; note = 2'-O-methyladenosine-3'-phosphorothioate
  modified_base 23: mod_base = OTHER; note = 2'-O-methyladenosine-3'-phosphate
  misc_feature 1: note = RNA
  misc_feature 2: note = DNA
  misc_feature 3..4: note = RNA
  misc_feature 5: note = DNA
  misc_feature 6: note = RNA
  misc_feature 7: note = DNA
  misc_feature 8..11: note = RNA
  misc_feature 12: note = DNA
  misc_feature 13..23: note = RNA
actcaagcaaagagtgccaggaa

SEQ ID NO: 7396 - DNA, 23 bp, synthetic construct
  source 1..23: mol_type = other DNA
  modified_base 1: mod_base = OTHER; note = 2'-O-methyladenosine-3'-phosphorothioate
  modified_base 2: mod_base = OTHER; note = 2'-deoxycytidine-3'-phosphorothioate
  modified_base 3: mod_base = OTHER; note = 2'-O-methylcytidine-3'-phosphate
  modified_base 4: mod_base = OTHER; note = 2'-O-methyluridine-3'-phosphate
  modified_base 6: mod_base = OTHER; note = 2'-O-methyladenosine-3'-phosphate
  modified_base 8: mod_base = OTHER; note = 2'-O-methylguanosine-3'-phosphate
  modified_base 9: mod_base = OTHER; note = 2'-O-methylcytidine-3'-phosphate
  modified_base 10: mod_base = OTHER; note = 2'-O-methyladenosine-3'-phosphate
  modified_base 11: mod_base = OTHER; note = 2'-O-methyladenosine-3'-phosphate
  modified_base 13: mod_base = OTHER; note = 2'-O-methylguanosine-3'-phosphate
  modified_base 14: mod_base = OTHER; note = 2'-fluoroadenosine-3'-phosphate
  modified_base 15: mod_base = OTHER; note = 2'-O-methylguanosine-3'-phosphate
  modified_base 16: mod_base = OTHER; note = 2'-O-methyluridine-3'-phosphate
  modified_base 17: mod_base = OTHER; note = 2'-O-methylguanosine-3'-phosphate
  modified_base 18: mod_base = OTHER; note = 2'-O-methylcytidine-3'-phosphate
  modified_base 19: mod_base = OTHER; note = 2'-O-methylcytidine-3'-phosphate
  modified_base 20: mod_base = OTHER; note = 2'-O-methyladenosine-3'-phosphate
  modified_base 21: mod_base = OTHER; note = 2'-O-methylguanosine-3'-phosphorothioate
  modified_base 22: mod_base = OTHER; note = 2'-O-methylguanosine-3'-phosphorothioate
  modified_base 23: mod_base = OTHER; note = 2'-O-methyladenosine-3'-phosphate
  misc_feature 1: note = RNA
  misc_feature 2: note = DNA
  misc_feature 3..4: note = RNA
  misc_feature 5: note = DNA
  misc_feature 6: note = RNA
  misc_feature 7: note = DNA
  misc_feature 8..11: note = RNA
  misc_feature 12: note = DNA
  misc_feature 13..23: note = RNA
acctcaagcaaagagtgccagga

SEQ ID NO: 7397 - DNA, 23 bp, synthetic construct
  source 1..23: mol_type = other DNA
  modified_base 1: mod_base = OTHER; note = 2'-O-methyladenosine-3'-phosphorothioate
  modified_base 2: mod_base = OTHER; note = 2'-deoxythimidine-3'-phosphorothioate
  modified_base 3: mod_base = OTHER; note = 2'-O-methylcytidine-3'-phosphate
  modified_base 4: mod_base = OTHER; note = 2'-O-methylcytidine-3'-phosphate
  modified_base 6: mod_base = OTHER; note = 2'-O-methylcytidine-3'-phosphate
  modified_base 8: mod_base = OTHER; note = 2'-O-methyladenosine-3'-phosphate
  modified_base 9: mod_base = OTHER; note = 2'-O-methylguanosine-3'-phosphate
  modified_base 10: mod_base = OTHER; note = 2'-O-methylcytidine-3'-phosphate
  modified_base 11: mod_base = OTHER; note = 2'-O-methyladenosine-3'-phosphate
  modified_base 13: mod_base = OTHER; note = 2'-O-methyladenosine-3'-phosphate
  modified_base 14: mod_base = OTHER; note = 2'-fluoroguanosine-3'-phosphate
  modified_base 15: mod_base = OTHER; note = 2'-O-methyladenosine-3'-phosphate
  modified_base 16: mod_base = OTHER; note = 2'-O-methylguanosine-3'-phosphate
  modified_base 17: mod_base = OTHER; note = 2'-O-methyluridine-3'-phosphate
  modified_base 18: mod_base = OTHER; note = 2'-O-methylguanosine-3'-phosphate
  modified_base 19: mod_base = OTHER; note = 2'-O-methylcytidine-3'-phosphate
  modified_base 20: mod_base = OTHER; note = 2'-O-methylcytidine-3'-phosphate
  modified_base 21: mod_base = OTHER; note = 2'-O-methyladenosine-3'-phosphorothioate
  modified_base 22: mod_base = OTHER; note = 2'-O-methylguanosine-3'-phosphorothioate
  modified_base 23: mod_base = OTHER; note = 2'-O-methylguanosine-3'-phosphate
  misc_feature 1: note = RNA
  misc_feature 2: note = DNA
  misc_feature 3..4: note = RNA
  misc_feature 5: note = DNA
  misc_feature 6: note = RNA
  misc_feature 7: note = DNA
  misc_feature 8..11: note = RNA
  misc_feature 12: note = DNA
  misc_feature 13..23: note = RNA
atcctcaagcaaagagtgccagg

SEQ ID NO: 7398 - DNA, 23 bp, synthetic construct
  source 1..23: mol_type = other DNA
  modified_base 1: mod_base = OTHER; note = 2'-O-methyladenosine-3'-phosphorothioate
  modified_base 2: mod_base = OTHER; note = 2'-deoxyadenosine-3'-phosphorothioate
  modified_base 3: mod_base = OTHER; note = 2'-O-methyluridine-3'-phosphate
  modified_base 4: mod_base = OTHER; note = 2'-O-methylcytidine-3'-phosphate
  modified_base 6: mod_base = OTHER; note = 2'-O-methyluridine-3'-phosphate
  modified_base 8: mod_base = OTHER; note = 2'-O-methyladenosine-3'-phosphate
  modified_base 9: mod_base = OTHER; note = 2'-O-methyladenosine-3'-phosphate
  modified_base 10: mod_base = OTHER; note = 2'-O-methylguanosine-3'-phosphate
  modified_base 11: mod_base = OTHER; note = 2'-O-methylcytidine-3'-phosphate
  modified_base 13: mod_base = OTHER; note = 2'-O-methyladenosine-3'-phosphate
  modified_base 14: mod_base = OTHER; note = 2'-fluoroadenosine-3'-phosphate
  modified_base 15: mod_base = OTHER; note = 2'-O-methylguanosine-3'-phosphate
  modified_base 16: mod_base = OTHER; note = 2'-O-methyladenosine-3'-phosphate
  modified_base 17: mod_base = OTHER; note = 2'-O-methylguanosine-3'-phosphate
  modified_base 18: mod_base = OTHER; note = 2'-O-methyluridine-3'-phosphate
  modified_base 19: mod_base = OTHER; note = 2'-O-methylguanosine-3'-phosphate
  modified_base 20: mod_base = OTHER; note = 2'-O-methylcytidine-3'-phosphate
  modified_base 21: mod_base = OTHER; note = 2'-O-methylcytidine-3'-phosphorothioate
  modified_base 22: mod_base = OTHER; note = 2'-O-methyladenosine-3'-phosphorothioate
  modified_base 23: mod_base = OTHER; note = 2'-O-methylguanosine-3'-phosphate
  misc_feature 1: note = RNA
  misc_feature 2: note = DNA
  misc_feature 3..4: note = RNA
  misc_feature 5: note = DNA
  misc_feature 6: note = RNA
  misc_feature 7: note = DNA
  misc_feature 8..11: note = RNA
  misc_feature 12: note = DNA
  misc_feature 13..23: note = RNA
aatcctcaagcaaagagtgccag

SEQ ID NO: 7399 - DNA, 23 bp, synthetic construct
  source 1..23: mol_type = other DNA
  modified_base 1: mod_base = OTHER; note = 2'-O-methyladenosine-3'-phosphorothioate
  modified_base 2: mod_base = OTHER; note = 2'-deoxyguanosine-3'-phosphorothioate
  modified_base 3: mod_base = OTHER; note = 2'-O-methyladenosine-3'-phosphate
  modified_base 4: mod_base = OTHER; note = 2'-O-methyluridine-3'-phosphate
  modified_base 6: mod_base = OTHER; note = 2'-O-methylcytidine-3'-phosphate
  modified_base 8: mod_base = OTHER; note = 2'-O-methylcytidine-3'-phosphate
  modified_base 9: mod_base = OTHER; note = 2'-O-methyladenosine-3'-phosphate
  modified_base 10: mod_base = OTHER; note = 2'-O-methyladenosine-3'-phosphate
  modified_base 11: mod_base = OTHER; note = 2'-O-methylguanosine-3'-phosphate
  modified_base 13: mod_base = OTHER; note = 2'-O-methyladenosine-3'-phosphate
  modified_base 14: mod_base = OTHER; note = 2'-fluoroadenosine-3'-phosphate
  modified_base 15: mod_base = OTHER; note = 2'-O-methyladenosine-3'-phosphate
  modified_base 16: mod_base = OTHER; note = 2'-O-methylguanosine-3'-phosphate
  modified_base 17: mod_base = OTHER; note = 2'-O-methyladenosine-3'-phosphate
  modified_base 18: mod_base = OTHER; note = 2'-O-methylguanosine-3'-phosphate
  modified_base 19: mod_base = OTHER; note = 2'-O-methyluridine-3'-phosphate
  modified_base 20: mod_base = OTHER; note = 2'-O-methylguanosine-3'-phosphate
  modified_base 21: mod_base = OTHER; note = 2'-O-methylcytidine-3'-phosphorothioate
  modified_base 22: mod_base = OTHER; note = 2'-O-methylcytidine-3'-phosphorothioate
  modified_base 23: mod_base = OTHER; note = 2'-O-methyladenosine-3'-phosphate
  misc_feature 1: note = RNA
  misc_feature 2: note = DNA
  misc_feature 3..4: note = RNA
  misc_feature 5: note = DNA
  misc_feature 6: note = RNA
  misc_feature 7: note = DNA
  misc_feature 8..11: note = RNA
  misc_feature 12: note = DNA
  misc_feature 13..23: note = RNA
agatcctcaagcaaagagtgcca

SEQ ID NO: 7400 - DNA, 23 bp, synthetic construct
  source 1..23: mol_type = other DNA
  modified_base 1: mod_base = OTHER; note = 2'-O-methyladenosine-3'-phosphorothioate
  modified_base 2: mod_base = OTHER; note = 2'-deoxyadenosine-3'-phosphorothioate
  modified_base 3: mod_base = OTHER; note = 2'-O-methyladenosine-3'-phosphate
  modified_base 4: mod_base = OTHER; note = 2'-O-methylguanosine-3'-phosphate
  modified_base 6: mod_base = OTHER; note = 2'-O-methyluridine-3'-phosphate
  modified_base 8: mod_base = OTHER; note = 2'-O-methylcytidine-3'-phosphate
  modified_base 9: mod_base = OTHER; note = 2'-O-methyluridine-3'-phosphate
  modified_base 10: mod_base = OTHER; note = 2'-O-methylcytidine-3'-phosphate
  modified_base 11: mod_base = OTHER; note = 2'-O-methyladenosine-3'-phosphate
  modified_base 13: mod_base = OTHER; note = 2'-O-methylguanosine-3'-phosphate
  modified_base 14: mod_base = OTHER; note = 2'-fluorocytidine-3'-phosphate
  modified_base 15: mod_base = OTHER; note = 2'-O-methyladenosine-3'-phosphate
  modified_base 16: mod_base = OTHER; note = 2'-O-methyladenosine-3'-phosphate
  modified_base 17: mod_base = OTHER; note = 2'-O-methyladenosine-3'-phosphate
  modified_base 18: mod_base = OTHER; note = 2'-O-methylguanosine-3'-phosphate
  modified_base 19: mod_base = OTHER; note = 2'-O-methyladenosine-3'-phosphate
  modified_base 20: mod_base = OTHER; note = 2'-O-methylguanosine-3'-phosphate
  modified_base 21: mod_base = OTHER; note = 2'-O-methyluridine-3'-phosphorothioate
  modified_base 22: mod_base = OTHER; note = 2'-O-methylguanosine-3'-phosphorothioate
  modified_base 23: mod_base = OTHER; note = 2'-O-methylcytidine-3'-phosphate
  misc_feature 1: note = RNA
  misc_feature 2: note = DNA
  misc_feature 3..4: note = RNA
  misc_feature 5: note = DNA
  misc_feature 6: note = RNA
  misc_feature 7: note = DNA
  misc_feature 8..11: note = RNA
  misc_feature 12: note = DNA
  misc_feature 13..23: note = RNA
aaagatcctcaagcaaagagtgc

SEQ ID NO: 7401 - DNA, 23 bp, synthetic construct
  source 1..23: mol_type = other DNA
  modified_base 1: mod_base = OTHER; note = 2'-O-methyladenosine-3'-phosphorothioate
  modified_base 2: mod_base = OTHER; note = 2'-deoxyguanosine-3'-phosphorothioate
  modified_base 3: mod_base = OTHER; note = 2'-O-methyladenosine-3'-phosphate
  modified_base 4: mod_base = OTHER; note = 2'-O-methyladenosine-3'-phosphate
  modified_base 6: mod_base = OTHER; note = 2'-O-methyladenosine-3'-phosphate
  modified_base 8: mod_base = OTHER; note = 2'-O-methylcytidine-3'-phosphate
  modified_base 9: mod_base = OTHER; note = 2'-O-methylcytidine-3'-phosphate
  modified_base 10: mod_base = OTHER; note = 2'-O-methyluridine-3'-phosphate
  modified_base 11: mod_base = OTHER; note = 2'-O-methylcytidine-3'-phosphate
  modified_base 13: mod_base = OTHER; note = 2'-O-methyladenosine-3'-phosphate
  modified_base 14: mod_base = OTHER; note = 2'-fluoroguanosine-3'-phosphate
  modified_base 15: mod_base = OTHER; note = 2'-O-methylcytidine-3'-phosphate
  modified_base 16: mod_base = OTHER; note = 2'-O-methyladenosine-3'-phosphate
  modified_base 17: mod_base = OTHER; note = 2'-O-methyladenosine-3'-phosphate
  modified_base 18: mod_base = OTHER; note = 2'-O-methyladenosine-3'-phosphate
  modified_base 19: mod_base = OTHER; note = 2'-O-methylguanosine-3'-phosphate
  modified_base 20: mod_base = OTHER; note = 2'-O-methyladenosine-3'-phosphate
  modified_base 21: mod_base = OTHER; note = 2'-O-methylguanosine-3'-phosphorothioate
  modified_base 22: mod_base = OTHER; note = 2'-O-methyluridine-3'-phosphorothioate
  modified_base 23: mod_base = OTHER; note = 2'-O-methylguanosine-3'-phosphate
  misc_feature 1: note = RNA
  misc_feature 2: note = DNA
  misc_feature 3..4: note = RNA
  misc_feature 5: note = DNA
  misc_feature 6: note = RNA
  misc_feature 7: note = DNA
  misc_feature 8..11: note = RNA
  misc_feature 12: note = DNA
  misc_feature 13..23: note = RNA
agaagatcctcaagcaaagagtg

SEQ ID NO: 7402 - DNA, 23 bp, synthetic construct
  source 1..23: mol_type = other DNA
  modified_base 1: mod_base = OTHER; note = 2'-O-methyladenosine-3'-phosphorothioate
  modified_base 2: mod_base = OTHER; note = 2'-deoxyguanosine-3'-phosphorothioate
  modified_base 3: mod_base = OTHER; note = 2'-O-methylguanosine-3'-phosphate
  modified_base 4: mod_base = OTHER; note = 2'-O-methyladenosine-3'-phosphate
  modified_base 6: mod_base = OTHER; note = 2'-O-methylguanosine-3'-phosphate
  modified_base 8: mod_base = OTHER; note = 2'-O-methyluridine-3'-phosphate
  modified_base 9: mod_base = OTHER; note = 2'-O-methylcytidine-3'-phosphate
  modified_base 10: mod_base = OTHER; note = 2'-O-methylcytidine-3'-phosphate
  modified_base 11: mod_base = OTHER; note = 2'-O-methyluridine-3'-phosphate
  modified_base 13: mod_base = OTHER; note = 2'-O-methyladenosine-3'-phosphate
  modified_base 14: mod_base = OTHER; note = 2'-fluoroadenosine-3'-phosphate
  modified_base 15: mod_base = OTHER; note = 2'-O-methylguanosine-3'-phosphate
  modified_base 16: mod_base = OTHER; note = 2'-O-methylcytidine-3'-phosphate
  modified_base 17: mod_base = OTHER; note = 2'-O-methyladenosine-3'-phosphate
  modified_base 18: mod_base = OTHER; note = 2'-O-methyladenosine-3'-phosphate
  modified_base 19: mod_base = OTHER; note = 2'-O-methyladenosine-3'-phosphate
  modified_base 20: mod_base = OTHER; note = 2'-O-methylguanosine-3'-phosphate
  modified_base 21: mod_base = OTHER; note = 2'-O-methyladenosine-3'-phosphorothioate
  modified_base 22: mod_base = OTHER; note = 2'-O-methylguanosine-3'-phosphorothioate
  modified_base 23: mod_base = OTHER; note = 2'-O-methyluridine-3'-phosphate
  misc_feature 1: note = RNA
  misc_feature 2: note = DNA
  misc_feature 3..4: note = RNA
  misc_feature 5: note = DNA
  misc_feature 6: note = RNA
  misc_feature 7: note = DNA
  misc_feature 8..11: note = RNA
  misc_feature 12: note = DNA
  misc_feature 13..23: note = RNA
aggaagatcctcaagcaaagagt

SEQ ID NO: 7403 - DNA, 23 bp, synthetic construct
  source 1..23: mol_type = other DNA
  modified_base 1: mod_base = OTHER; note = 2'-O-methyladenosine-3'-phosphorothioate
  modified_base 2: mod_base = OTHER; note = 2'-deoxythimidine-3'-phosphorothioate
  modified_base 3: mod_base = OTHER; note = 2'-O-methylcytidine-3'-phosphate
  modified_base 4: mod_base = OTHER; note = 2'-O-methylguanosine-3'-phosphate
  modified_base 6: mod_base = OTHER; note = 2'-O-methyladenosine-3'-phosphate
  modified_base 8: mod_base = OTHER; note = 2'-O-methylguanosine-3'-phosphate
  modified_base 9: mod_base = OTHER; note = 2'-O-methyladenosine-3'-phosphate
  modified_base 10: mod_base = OTHER; note = 2'-O-methyluridine-3'-phosphate
  modified_base 11: mod_base = OTHER; note = 2'-O-methylcytidine-3'-phosphate
  modified_base 13: mod_base = OTHER; note = 2'-O-methyluridine-3'-phosphate
  modified_base 14: mod_base = OTHER; note = 2'-fluorocytidine-3'-phosphate
  modified_base 15: mod_base = OTHER; note = 2'-O-methyladenosine-3'-phosphate
  modified_base 16: mod_base = OTHER; note = 2'-O-methyladenosine-3'-phosphate
  modified_base 17: mod_base = OTHER; note = 2'-O-methylguanosine-3'-phosphate
  modified_base 18: mod_base = OTHER; note = 2'-O-methylcytidine-3'-phosphate
  modified_base 19: mod_base = OTHER; note = 2'-O-methyladenosine-3'-phosphate
  modified_base 20: mod_base = OTHER; note = 2'-O-methyladenosine-3'-phosphate
  modified_base 21: mod_base = OTHER; note = 2'-O-methyladenosine-3'-phosphorothioate
  modified_base 22: mod_base = OTHER; note = 2'-O-methylguanosine-3'-phosphorothioate
  modified_base 23: mod_base = OTHER; note = 2'-O-methyladenosine-3'-phosphate
  misc_feature 1: note = RNA
  misc_feature 2: note = DNA
  misc_feature 3..4: note = RNA
  misc_feature 5: note = DNA
  misc_feature 6: note = RNA
  misc_feature 7: note = DNA
  misc_feature 8..11: note = RNA
  misc_feature 12: note = DNA
  misc_feature 13..23: note = RNA
atcggaagatcctcaagcaaaga

SEQ ID NO: 7404 - DNA, 23 bp, synthetic construct
  source 1..23: mol_type = other DNA
  modified_base 1: mod_base = OTHER; note = 2'-O-methyladenosine-3'-phosphorothioate
  modified_base 2: mod_base = OTHER; note = 2'-deoxyadenosine-3'-phosphorothioate
  modified_base 3: mod_base = OTHER; note = 2'-O-methyluridine-3'-phosphate
  modified_base 4: mod_base = OTHER; note = 2'-O-methylcytidine-3'-phosphate
  modified_base 6: mod_base = OTHER; note = 2'-O-methylguanosine-3'-phosphate
  modified_base 8: mod_base = OTHER; note = 2'-O-methyladenosine-3'-phosphate
  modified_base 9: mod_base = OTHER; note = 2'-O-methylguanosine-3'-phosphate
  modified_base 10: mod_base = OTHER; note = 2'-O-methyladenosine-3'-phosphate
  modified_base 11: mod_base = OTHER; note = 2'-O-methyluridine-3'-phosphate
  modified_base 13: mod_base = OTHER; note = 2'-O-methylcytidine-3'-phosphate
  modified_base 14: mod_base = OTHER; note = 2'-fluorouridine-3'-phosphate
  modified_base 15: mod_base = OTHER; note = 2'-O-methylcytidine-3'-phosphate
  modified_base 16: mod_base = OTHER; note = 2'-O-methyladenosine-3'-phosphate
  modified_base 17: mod_base = OTHER; note = 2'-O-methyladenosine-3'-phosphate
  modified_base 18: mod_base = OTHER; note = 2'-O-methylguanosine-3'-phosphate
  modified_base 19: mod_base = OTHER; note = 2'-O-methylcytidine-3'-phosphate
  modified_base 20: mod_base = OTHER; note = 2'-O-methyladenosine-3'-phosphate
  modified_base 21: mod_base = OTHER; note = 2'-O-methyladenosine-3'-phosphorothioate
  modified_base 22: mod_base = OTHER; note = 2'-O-methyladenosine-3'-phosphorothioate
  modified_base 23: mod_base = OTHER; note = 2'-O-methylguanosine-3'-phosphate
  misc_feature 1: note = RNA
  misc_feature 2: note = DNA
  misc_feature 3..4: note = RNA
  misc_feature 5: note = DNA
  misc_feature 6: note = RNA
  misc_feature 7: note = DNA
  misc_feature 8..11: note = RNA
  misc_feature 12: note = DNA
  misc_feature 13..23: note = RNA
aatcggaagatcctcaagcaaag

SEQ ID NO: 7405 - DNA, 23 bp, synthetic construct
  source 1..23: mol_type = other DNA
  modified_base 1: mod_base = OTHER; note = 2'-O-methyladenosine-3'-phosphorothioate
  modified_base 2: mod_base = OTHER; note = 2'-deoxycytidine-3'-phosphorothioate
  modified_base 3: mod_base = OTHER; note = 2'-O-methyladenosine-3'-phosphate
  modified_base 4: mod_base = OTHER; note = 2'-O-methyluridine-3'-phosphate
  modified_base 6: mod_base = OTHER; note = 2'-O-methylguanosine-3'-phosphate
  modified_base 8: mod_base = OTHER; note = 2'-O-methyladenosine-3'-phosphate
  modified_base 9: mod_base = OTHER; note = 2'-O-methyladenosine-3'-phosphate
  modified_base 10: mod_base = OTHER; note = 2'-O-methylguanosine-3'-phosphate
  modified_base 11: mod_base = OTHER; note = 2'-O-methyladenosine-3'-phosphate
  modified_base 13: mod_base = OTHER; note = 2'-O-methylcytidine-3'-phosphate
  modified_base 14: mod_base = OTHER; note = 2'-fluorocytidine-3'-phosphate
  modified_base 15: mod_base = OTHER; note = 2'-O-methyluridine-3'-phosphate
  modified_base 16: mod_base = OTHER; note = 2'-O-methylcytidine-3'-phosphate
  modified_base 17: mod_base = OTHER; note = 2'-O-methyladenosine-3'-phosphate
  modified_base 18: mod_base = OTHER; note = 2'-O-methyladenosine-3'-phosphate
  modified_base 19: mod_base = OTHER; note = 2'-O-methylguanosine-3'-phosphate
  modified_base 20: mod_base = OTHER; note = 2'-O-methylcytidine-3'-phosphate
  modified_base 21: mod_base = OTHER; note = 2'-O-methyladenosine-3'-phosphorothioate
  modified_base 22: mod_base = OTHER; note = 2'-O-methyladenosine-3'-phosphorothioate
  modified_base 23: mod_base = OTHER; note = 2'-O-methyladenosine-3'-phosphate
  misc_feature 1: note = RNA
  misc_feature 2: note = DNA
  misc_feature 3..4: note = RNA
  misc_feature 5: note = DNA
  misc_feature 6: note = RNA
  misc_feature 7: note = DNA
  misc_feature 8..11: note = RNA
  misc_feature 12: note = DNA
  misc_feature 13..23: note = RNA
acatcggaagatcctcaagcaaa

SEQ ID NO: 7406 - DNA, 23 bp, synthetic construct
  source 1..23: mol_type = other DNA
  modified_base 1: mod_base = OTHER; note = 2'-O-methyladenosine-3'-phosphorothioate
  modified_base 2: mod_base = OTHER; note = 2'-deoxycytidine-3'-phosphorothioate
  modified_base 3: mod_base = OTHER; note = 2'-O-methylcytidine-3'-phosphate
  modified_base 4: mod_base = OTHER; note = 2'-O-methyladenosine-3'-phosphate
  modified_base 6: mod_base = OTHER; note = 2'-O-methylcytidine-3'-phosphate
  modified_base 8: mod_base = OTHER; note = 2'-O-methylguanosine-3'-phosphate
  modified_base 9: mod_base = OTHER; note = 2'-O-methyladenosine-3'-phosphate
  modified_base 10: mod_base = OTHER; note = 2'-O-methyladenosine-3'-phosphate
  modified_base 11: mod_base = OTHER; note = 2'-O-methylguanosine-3'-phosphate
  modified_base 13: mod_base = OTHER; note = 2'-O-methyluridine-3'-phosphate
  modified_base 14: mod_base = OTHER; note = 2'-fluorocytidine-3'-phosphate
  modified_base 15: mod_base = OTHER; note = 2'-O-methylcytidine-3'-phosphate
  modified_base 16: mod_base = OTHER; note = 2'-O-methyluridine-3'-phosphate
  modified_base 17: mod_base = OTHER; note = 2'-O-methylcytidine-3'-phosphate
  modified_base 18: mod_base = OTHER; note = 2'-O-methyladenosine-3'-phosphate
  modified_base 19: mod_base = OTHER; note = 2'-O-methyladenosine-3'-phosphate
  modified_base 20: mod_base = OTHER; note = 2'-O-methylguanosine-3'-phosphate
  modified_base 21: mod_base = OTHER; note = 2'-O-methylcytidine-3'-phosphorothioate
  modified_base 22: mod_base = OTHER; note = 2'-O-methyladenosine-3'-phosphorothioate
  modified_base 23: mod_base = OTHER; note = 2'-O-methyladenosine-3'-phosphate
  misc_feature 1: note = RNA
  misc_feature 2: note = DNA
  misc_feature 3..4: note = RNA
  misc_feature 5: note = DNA
  misc_feature 6: note = RNA
  misc_feature 7: note = DNA
  misc_feature 8..11: note = RNA
  misc_feature 12: note = DNA
  misc_feature 13..23: note = RNA
accatcggaagatcctcaagcaa

SEQ ID NO: 7407 - DNA, 23 bp, synthetic construct
  source 1..23: mol_type = other DNA
  modified_base 1: mod_base = OTHER; note = 2'-O-methyladenosine-3'-phosphorothioate
  modified_base 2: mod_base = OTHER; note = 2'-deoxyguanosine-3'-phosphorothioate
  modified_base 3: mod_base = OTHER; note = 2'-O-methyluridine-3'-phosphate
  modified_base 4: mod_base = OTHER; note = 2'-O-methylguanosine-3'-phosphate
  modified_base 6: mod_base = OTHER; note = 2'-O-methyluridine-3'-phosphate
  modified_base 8: mod_base = OTHER; note = 2'-O-methyluridine-3'-phosphate
  modified_base 9: mod_base = OTHER; note = 2'-O-methylguanosine-3'-phosphate
  modified_base 10: mod_base = OTHER; note = 2'-O-methylguanosine-3'-phosphate
  modified_base 11: mod_base = OTHER; note = 2'-O-methyluridine-3'-phosphate
  modified_base 13: mod_base = OTHER; note = 2'-O-methylcytidine-3'-phosphate
  modified_base 14: mod_base = OTHER; note = 2'-fluorouridine-3'-phosphate
  modified_base 15: mod_base = OTHER; note = 2'-O-methylcytidine-3'-phosphate
  modified_base 16: mod_base = OTHER; note = 2'-O-methyladenosine-3'-phosphate
  modified_base 17: mod_base = OTHER; note = 2'-O-methylguanosine-3'-phosphate
  modified_base 18: mod_base = OTHER; note = 2'-O-methylcytidine-3'-phosphate
  modified_base 19: mod_base = OTHER; note = 2'-O-methylcytidine-3'-phosphate
  modified_base 20: mod_base = OTHER; note = 2'-O-methyladenosine-3'-phosphate
  modified_base 21: mod_base = OTHER; note = 2'-O-methylguanosine-3'-phosphorothioate
  modified_base 22: mod_base = OTHER; note = 2'-O-methylguanosine-3'-phosphorothioate
  modified_base 23: mod_base = OTHER; note = 2'-O-methyladenosine-3'-phosphate
  misc_feature 1: note = RNA
  misc_feature 2: note = DNA
  misc_feature 3..4: note = RNA
  misc_feature 5: note = DNA
  misc_feature 6: note = RNA
  misc_feature 7: note = DNA
  misc_feature 8..11: note = RNA
  misc_feature 12: note = DNA
  misc_feature 13..23: note = RNA
agtgatgtggtgctcagccagga

SEQ ID NO: 7408 - DNA, 23 bp, synthetic construct
  source 1..23: mol_type = other DNA
  modified_base 1: mod_base = OTHER; note = 2'-O-methyladenosine-3'-phosphorothioate
  modified_base 2: mod_base = OTHER; note = 2'-deoxyguanosine-3'-phosphorothioate
  modified_base 3: mod_base = OTHER; note = 2'-O-methylguanosine-3'-phosphate
  modified_base 4: mod_base = OTHER; note = 2'-O-methyluridine-3'-phosphate
  modified_base 6: mod_base = OTHER; note = 2'-O-methyladenosine-3'-phosphate
  modified_base 8: mod_base = OTHER; note = 2'-O-methylguanosine-3'-phosphate
  modified_base 9: mod_base = OTHER; note = 2'-O-methyluridine-3'-phosphate
  modified_base 10: mod_base = OTHER; note = 2'-O-methylguanosine-3'-phosphate
  modified_base 11: mod_base = OTHER; note = 2'-O-methylguanosine-3'-phosphate
  modified_base 13: mod_base = OTHER; note = 2'-O-methylguanosine-3'-phosphate
  modified_base 14: mod_base = OTHER; note = 2'-fluorocytidine-3'-phosphate
  modified_base 15: mod_base = OTHER; note = 2'-O-methyluridine-3'-phosphate
  modified_base 16: mod_base = OTHER; note = 2'-O-methylcytidine-3'-phosphate
  modified_base 17: mod_base = OTHER; note = 2'-O-methyladenosine-3'-phosphate
  modified_base 18: mod_base = OTHER; note = 2'-O-methylguanosine-3'-phosphate
  modified_base 19: mod_base = OTHER; note = 2'-O-methylcytidine-3'-phosphate
  modified_base 20: mod_base = OTHER; note = 2'-O-methylcytidine-3'-phosphate
  modified_base 21: mod_base = OTHER; note = 2'-O-methyladenosine-3'-phosphorothioate
  modified_base 22: mod_base = OTHER; note = 2'-O-methylguanosine-3'-phosphorothioate
  modified_base 23: mod_base = OTHER; note = 2'-O-methylguanosine-3'-phosphate
  misc_feature 1: note = RNA
  misc_feature 2: note = DNA
  misc_feature 3..4: note = RNA
  misc_feature 5: note = DNA
  misc_feature 6: note = RNA
  misc_feature 7: note = DNA
  misc_feature 8..11: note = RNA
  misc_feature 12: note = DNA
  misc_feature 13..23: note = RNA
aggtgatgtggtgctcagccagg

SEQ ID NO: 7409 - DNA, 23 bp, synthetic construct
  source 1..23: mol_type = other DNA
  modified_base 1: mod_base = OTHER; note = 2'-O-methyladenosine-3'-phosphorothioate
  modified_base 2: mod_base = OTHER; note = 2'-deoxythimidine-3'-phosphorothioate
  modified_base 3: mod_base = OTHER; note = 2'-O-methylguanosine-3'-phosphate
  modified_base 4: mod_base = OTHER; note = 2'-O-methylguanosine-3'-phosphate
  modified_base 6: mod_base = OTHER; note = 2'-O-methylguanosine-3'-phosphate
  modified_base 8: mod_base = OTHER; note = 2'-O-methyluridine-3'-phosphate
  modified_base 9: mod_base = OTHER; note = 2'-O-methylguanosine-3'-phosphate
  modified_base 10: mod_base = OTHER; note = 2'-O-methyluridine-3'-phosphate
  modified_base 11: mod_base = OTHER; note = 2'-O-methylguanosine-3'-phosphate
  modified_base 13: mod_base = OTHER; note = 2'-O-methyluridine-3'-phosphate
  modified_base 14: mod_base = OTHER; note = 2'-fluoroguanosine-3'-phosphate
  modified_base 15: mod_base = OTHER; note = 2'-O-methylcytidine-3'-phosphate
  modified_base 16: mod_base = OTHER; note = 2'-O-methyluridine-3'-phosphate
  modified_base 17: mod_base = OTHER; note = 2'-O-methylcytidine-3'-phosphate
  modified_base 18: mod_base = OTHER; note = 2'-O-methyladenosine-3'-phosphate
  modified_base 19: mod_base = OTHER; note = 2'-O-methylguanosine-3'-phosphate
  modified_base 20: mod_base = OTHER; note = 2'-O-methylcytidine-3'-phosphate
  modified_base 21: mod_base = OTHER; note = 2'-O-methylcytidine-3'-phosphorothioate
  modified_base 22: mod_base = OTHER; note = 2'-O-methyladenosine-3'-phosphorothioate
  modified_base 23: mod_base = OTHER; note = 2'-O-methylguanosine-3'-phosphate
  misc_feature 1: note = RNA
  misc_feature 2: note = DNA
  misc_feature 3..4: note = RNA
  misc_feature 5: note = DNA
  misc_feature 6: note = RNA
  misc_feature 7: note = DNA
  misc_feature 8..11: note = RNA
  misc_feature 12: note = DNA
  misc_feature 13..23: note = RNA
atggtgatgtggtgctcagccag

SEQ ID NO: 7410 - DNA, 23 bp, synthetic construct
  source 1..23: mol_type = other DNA
  modified_base 1: mod_base = OTHER; note = 2'-O-methyladenosine-3'-phosphorothioate
  modified_base 2: mod_base = OTHER; note = 2'-deoxythimidine-3'-phosphorothioate
  modified_base 3: mod_base = OTHER; note = 2'-O-methyluridine-3'-phosphate
  modified_base 4: mod_base = OTHER; note = 2'-O-methylguanosine-3'-phosphate
  modified_base 6: mod_base = OTHER; note = 2'-O-methyluridine-3'-phosphate
  modified_base 8: mod_base = OTHER; note = 2'-O-methyladenosine-3'-phosphate
  modified_base 9: mod_base = OTHER; note = 2'-O-methyluridine-3'-phosphate
  modified_base 10: mod_base = OTHER; note = 2'-O-methylguanosine-3'-phosphate
  modified_base 11: mod_base = OTHER; note = 2'-O-methyluridine-3'-phosphate
  modified_base 13: mod_base = OTHER; note = 2'-O-methylguanosine-3'-phosphate
  modified_base 14: mod_base = OTHER; note = 2'-fluorouridine-3'-phosphate
  modified_base 15: mod_base = OTHER; note = 2'-O-methylguanosine-3'-phosphate
  modified_base 16: mod_base = OTHER; note = 2'-O-methylcytidine-3'-phosphate
  modified_base 17: mod_base = OTHER; note = 2'-O-methyluridine-3'-phosphate
  modified_base 18: mod_base = OTHER; note = 2'-O-methylcytidine-3'-phosphate
  modified_base 19: mod_base = OTHER; note = 2'-O-methyladenosine-3'-phosphate
  modified_base 20: mod_base = OTHER; note = 2'-O-methylguanosine-3'-phosphate
  modified_base 21: mod_base = OTHER; note = 2'-O-methylcytidine-3'-phosphorothioate
  modified_base 22: mod_base = OTHER; note = 2'-O-methylcytidine-3'-phosphorothioate
  modified_base 23: mod_base = OTHER; note = 2'-O-methyladenosine-3'-phosphate
  misc_feature 1: note = RNA
  misc_feature 2: note = DNA
  misc_feature 3..4: note = RNA
  misc_feature 5: note = DNA
  misc_feature 6: note = RNA
  misc_feature 7: note = DNA
  misc_feature 8..11: note = RNA
  misc_feature 12: note = DNA
  misc_feature 13..23: note = RNA
attggtgatgtggtgctcagcca

SEQ ID NO: 7411 - DNA, 23 bp, synthetic construct
  source 1..23: mol_type = other DNA
  modified_base 1: mod_base = OTHER; note = 2'-O-methyladenosine-3'-phosphorothioate
  modified_base 2: mod_base = OTHER; note = 2'-deoxyguanosine-3'-phosphorothioate
  modified_base 3: mod_base = OTHER; note = 2'-O-methyluridine-3'-phosphate
  modified_base 4: mod_base = OTHER; note = 2'-O-methyluridine-3'-phosphate
  modified_base 6: mod_base = OTHER; note = 2'-O-methylguanosine-3'-phosphate
  modified_base 8: mod_base = OTHER; note = 2'-O-methylguanosine-3'-phosphate
  modified_base 9: mod_base = OTHER; note = 2'-O-methyladenosine-3'-phosphate
  modified_base 10: mod_base = OTHER; note = 2'-O-methyluridine-3'-phosphate
  modified_base 11: mod_base = OTHER; note = 2'-O-methylguanosine-3'-phosphate
  modified_base 13: mod_base = OTHER; note = 2'-O-methylguanosine-3'-phosphate
  modified_base 14: mod_base = OTHER; note = 2'-fluoroguanosine-3'-phosphate
  modified_base 15: mod_base = OTHER; note = 2'-O-methyluridine-3'-phosphate
  modified_base 16: mod_base = OTHER; note = 2'-O-methylguanosine-3'-phosphate
  modified_base 17: mod_base = OTHER; note = 2'-O-methylcytidine-3'-phosphate
  modified_base 18: mod_base = OTHER; note = 2'-O-methyluridine-3'-phosphate
  modified_base 19: mod_base = OTHER; note = 2'-O-methylcytidine-3'-phosphate
  modified_base 20: mod_base = OTHER; note = 2'-O-methyladenosine-3'-phosphate
  modified_base 21: mod_base = OTHER; note = 2'-O-methylguanosine-3'-phosphorothioate
  modified_base 22: mod_base = OTHER; note = 2'-O-methylcytidine-3'-phosphorothioate
  modified_base 23: mod_base = OTHER; note = 2'-O-methylcytidine-3'-phosphate
  misc_feature 1: note = RNA
  misc_feature 2: note = DNA
  misc_feature 3..4: note = RNA
  misc_feature 5: note = DNA
  misc_feature 6: note = RNA
  misc_feature 7: note = DNA
  misc_feature 8..11: note = RNA
  misc_feature 12: note = DNA
  misc_feature 13..23: note = RNA
agttggtgatgtggtgctcagcc

SEQ ID NO: 7412 - DNA, 23 bp, synthetic construct
  source 1..23: mol_type = other DNA
  modified_base 1: mod_base = OTHER; note = 2'-O-methyladenosine-3'-phosphorothioate
  modified_base 2: mod_base = OTHER; note = 2'-deoxyguanosine-3'-phosphorothioate
  modified_base 3: mod_base = OTHER; note = 2'-O-methylguanosine-3'-phosphate
  modified_base 4: mod_base = OTHER; note = 2'-O-methyluridine-3'-phosphate
  modified_base 6: mod_base = OTHER; note = 2'-O-methylguanosine-3'-phosphate
  modified_base 8: mod_base = OTHER; note = 2'-O-methyluridine-3'-phosphate
  modified_base 9: mod_base = OTHER; note = 2'-O-methylguanosine-3'-phosphate
  modified_base 10: mod_base = OTHER; note = 2'-O-methyladenosine-3'-phosphate
  modified_base 11: mod_base = OTHER; note = 2'-O-methyluridine-3'-phosphate
  modified_base 13: mod_base = OTHER; note = 2'-O-methyluridine-3'-phosphate
  modified_base 14: mod_base = OTHER; note = 2'-fluoroguanosine-3'-phosphate
  modified_base 15: mod_base = OTHER; note = 2'-O-methylguanosine-3'-phosphate
  modified_base 16: mod_base = OTHER; note = 2'-O-methyluridine-3'-phosphate
  modified_base 17: mod_base = OTHER; note = 2'-O-methylguanosine-3'-phosphate
  modified_base 18: mod_base = OTHER; note = 2'-O-methylcytidine-3'-phosphate
  modified_base 19: mod_base = OTHER; note = 2'-O-methyluridine-3'-phosphate
  modified_base 20: mod_base = OTHER; note = 2'-O-methylcytidine-3'-phosphate
  modified_base 21: mod_base = OTHER; note = 2'-O-methyladenosine-3'-phosphorothioate
  modified_base 22: mod_base = OTHER; note = 2'-O-methylguanosine-3'-phosphorothioate
  modified_base 23: mod_base = OTHER; note = 2'-O-methylcytidine-3'-phosphate
  misc_feature 1: note = RNA
  misc_feature 2: note = DNA
  misc_feature 3..4: note = RNA
  misc_feature 5: note = DNA
  misc_feature 6: note = RNA
  misc_feature 7: note = DNA
  misc_feature 8..11: note = RNA
  misc_feature 12: note = DNA
  misc_feature 13..23: note = RNA
aggttggtgatgtggtgctcagc

SEQ ID NO: 7413 - DNA, 23 bp, synthetic construct
  source 1..23: mol_type = other DNA
  modified_base 1: mod_base = OTHER; note = 2'-O-methyladenosine-3'-phosphorothioate
  modified_base 2: mod_base = OTHER; note = 2'-deoxyadenosine-3'-phosphorothioate
  modified_base 3: mod_base = OTHER; note = 2'-O-methylguanosine-3'-phosphate
  modified_base 4: mod_base = OTHER; note = 2'-O-methylguanosine-3'-phosphate
  modified_base 6: mod_base = OTHER; note = 2'-O-methyluridine-3'-phosphate
  modified_base 8: mod_base = OTHER; note = 2'-O-methylguanosine-3'-phosphate
  modified_base 9: mod_base = OTHER; note = 2'-O-methyluridine-3'-phosphate
  modified_base 10: mod_base = OTHER; note = 2'-O-methylguanosine-3'-phosphate
  modified_base 11: mod_base = OTHER; note = 2'-O-methyladenosine-3'-phosphate
  modified_base 13: mod_base = OTHER; note = 2'-O-methylguanosine-3'-phosphate
  modified_base 14: mod_base = OTHER; note = 2'-fluorouridine-3'-phosphate
  modified_base 15: mod_base = OTHER; note = 2'-O-methylguanosine-3'-phosphate
  modified_base 16: mod_base = OTHER; note = 2'-O-methylguanosine-3'-phosphate
  modified_base 17: mod_base = OTHER; note = 2'-O-methyluridine-3'-phosphate
  modified_base 18: mod_base = OTHER; note = 2'-O-methylguanosine-3'-phosphate
  modified_base 19: mod_base = OTHER; note = 2'-O-methylcytidine-3'-phosphate
  modified_base 20: mod_base = OTHER; note = 2'-O-methyluridine-3'-phosphate
  modified_base 21: mod_base = OTHER; note = 2'-O-methylcytidine-3'-phosphorothioate
  modified_base 22: mod_base = OTHER; note = 2'-O-methyladenosine-3'-phosphorothioate
  modified_base 23: mod_base = OTHER; note = 2'-O-methylguanosine-3'-phosphate
  misc_feature 1: note = RNA
  misc_feature 2: note = DNA
  misc_feature 3..4: note = RNA
  misc_feature 5: note = DNA
  misc_feature 6: note = RNA
  misc_feature 7: note = DNA
  misc_feature 8..11: note = RNA
  misc_feature 12: note = DNA
  misc_feature 13..23: note = RNA
aaggttggtgatgtggtgctcag

SEQ ID NO: 7414 - DNA, 23 bp, synthetic construct
  source 1..23: mol_type = other DNA
  modified_base 1: mod_base = OTHER; note = 2'-O-methyladenosine-3'-phosphorothioate
  modified_base 2: mod_base = OTHER; note = 2'-deoxycytidine-3'-phosphorothioate
  modified_base 3: mod_base = OTHER; note = 2'-O-methyladenosine-3'-phosphate
  modified_base 4: mod_base = OTHER; note = 2'-O-methylguanosine-3'-phosphate
  modified_base 6: mod_base = OTHER; note = 2'-O-methyluridine-3'-phosphate
  modified_base 8: mod_base = OTHER; note = 2'-O-methylguanosine-3'-phosphate
  modified_base 9: mod_base = OTHER; note = 2'-O-methylguanosine-3'-phosphate
  modified_base 10: mod_base = OTHER; note = 2'-O-methyluridine-3'-phosphate
  modified_base 11: mod_base = OTHER; note = 2'-O-methylguanosine-3'-phosphate
  modified_base 13: mod_base = OTHER; note = 2'-O-methyluridine-3'-phosphate
  modified_base 14: mod_base = OTHER; note = 2'-fluoroguanosine-3'-phosphate
  modified_base 15: mod_base = OTHER; note = 2'-O-methyluridine-3'-phosphate
  modified_base 16: mod_base = OTHER; note = 2'-O-methylguanosine-3'-phosphate
  modified_base 17: mod_base = OTHER; note = 2'-O-methylguanosine-3'-phosphate
  modified_base 18: mod_base = OTHER; note = 2'-O-methyluridine-3'-phosphate
  modified_base 19: mod_base = OTHER; note = 2'-O-methylguanosine-3'-phosphate
  modified_base 20: mod_base = OTHER; note = 2'-O-methylcytidine-3'-phosphate
  modified_base 21: mod_base = OTHER; note = 2'-O-methyluridine-3'-phosphorothioate
  modified_base 22: mod_base = OTHER; note = 2'-O-methylcytidine-3'-phosphorothioate
  modified_base 23: mod_base = OTHER; note = 2'-O-methyladenosine-3'-phosphate
  misc_feature 1: note = RNA
  misc_feature 2: note = DNA
  misc_feature 3..4: note = RNA
  misc_feature 5: note = DNA
  misc_feature 6: note = RNA
  misc_feature 7: note = DNA
  misc_feature 8..11: note = RNA
  misc_feature 12: note = DNA
  misc_feature 13..23: note = RNA
acaggttggtgatgtggtgctca

SEQ ID NO: 7415 - DNA, 23 bp, synthetic construct
  source 1..23: mol_type = other DNA
  modified_base 1: mod_base = OTHER; note = 2'-O-methyladenosine-3'-phosphorothioate
  modified_base 2: mod_base = OTHER; note = 2'-deoxycytidine-3'-phosphorothioate
  modified_base 3: mod_base = OTHER; note = 2'-O-methylcytidine-3'-phosphate
  modified_base 4: mod_base = OTHER; note = 2'-O-methyladenosine-3'-phosphate
  modified_base 6: mod_base = OTHER; note = 2'-O-methylguanosine-3'-phosphate
  modified_base 8: mod_base = OTHER; note = 2'-O-methyluridine-3'-phosphate
  modified_base 9: mod_base = OTHER; note = 2'-O-methylguanosine-3'-phosphate
  modified_base 10: mod_base = OTHER; note = 2'-O-methylguanosine-3'-phosphate
  modified_base 11: mod_base = OTHER; note = 2'-O-methyluridine-3'-phosphate
  modified_base 13: mod_base = OTHER; note = 2'-O-methyladenosine-3'-phosphate
  modified_base 14: mod_base = OTHER; note = 2'-fluorouridine-3'-phosphate
  modified_base 15: mod_base = OTHER; note = 2'-O-methylguanosine-3'-phosphate
  modified_base 16: mod_base = OTHER; note = 2'-O-methyluridine-3'-phosphate
  modified_base 17: mod_base = OTHER; note = 2'-O-methylguanosine-3'-phosphate
  modified_base 18: mod_base = OTHER; note = 2'-O-methylguanosine-3'-phosphate
  modified_base 19: mod_base = OTHER; note = 2'-O-methyluridine-3'-phosphate
  modified_base 20: mod_base = OTHER; note = 2'-O-methylguanosine-3'-phosphate
  modified_base 21: mod_base = OTHER; note = 2'-O-methylcytidine-3'-phosphorothioate
  modified_base 22: mod_base = OTHER; note = 2'-O-methyluridine-3'-phosphorothioate
  modified_base 23: mod_base = OTHER; note = 2'-O-methylcytidine-3'-phosphate
  misc_feature 1: note = RNA
  misc_feature 2: note = DNA
  misc_feature 3..4: note = RNA
  misc_feature 5: note = DNA
  misc_feature 6: note = RNA
  misc_feature 7: note = DNA
  misc_feature 8..11: note = RNA
  misc_feature 12: note = DNA
  misc_feature 13..23: note = RNA
accaggttggtgatgtggtgctc

SEQ ID NO: 7416 - DNA, 23 bp, synthetic construct
  source 1..23: mol_type = other DNA
  modified_base 1: mod_base = OTHER; note = 2'-O-methyladenosine-3'-phosphorothioate
  modified_base 2: mod_base = OTHER; note = 2'-deoxyadenosine-3'-phosphorothioate
  modified_base 3: mod_base = OTHER; note = 2'-O-methylguanosine-3'-phosphate
  modified_base 4: mod_base = OTHER; note = 2'-O-methylcytidine-3'-phosphate
  modified_base 6: mod_base = OTHER; note = 2'-O-methylcytidine-3'-phosphate
  modified_base 8: mod_base = OTHER; note = 2'-O-methylguanosine-3'-phosphate
  modified_base 9: mod_base = OTHER; note = 2'-O-methylguanosine-3'-phosphate
  modified_base 10: mod_base = OTHER; note = 2'-O-methyluridine-3'-phosphate
  modified_base 11: mod_base = OTHER; note = 2'-O-methyluridine-3'-phosphate
  modified_base 13: mod_base = OTHER; note = 2'-O-methylguanosine-3'-phosphate
  modified_base 14: mod_base = OTHER; note = 2'-fluorouridine-3'-phosphate
  modified_base 15: mod_base = OTHER; note = 2'-O-methylguanosine-3'-phosphate
  modified_base 16: mod_base = OTHER; note = 2'-O-methyladenosine-3'-phosphate
  modified_base 17: mod_base = OTHER; note = 2'-O-methyluridine-3'-phosphate
  modified_base 18: mod_base = OTHER; note = 2'-O-methylguanosine-3'-phosphate
  modified_base 19: mod_base = OTHER; note = 2'-O-methyluridine-3'-phosphate
  modified_base 20: mod_base = OTHER; note = 2'-O-methylguanosine-3'-phosphate
  modified_base 21: mod_base = OTHER; note = 2'-O-methylguanosine-3'-phosphorothioate
  modified_base 22: mod_base = OTHER; note = 2'-O-methyluridine-3'-phosphorothioate
  modified_base 23: mod_base = OTHER; note = 2'-O-methylguanosine-3'-phosphate
  misc_feature 1: note = RNA
  misc_feature 2: note = DNA
  misc_feature 3..4: note = RNA
  misc_feature 5: note = DNA
  misc_feature 6: note = RNA
  misc_feature 7: note = DNA
  misc_feature 8..11: note = RNA
  misc_feature 12: note = DNA
  misc_feature 13..23: note = RNA
aagcccaggttggtgatgtggtg

SEQ ID NO: 7417 - DNA, 23 bp, synthetic construct
  source 1..23: mol_type = other DNA
  modified_base 1: mod_base = OTHER; note = 2'-O-methyladenosine-3'-phosphorothioate
  modified_base 2: mod_base = OTHER; note = 2'-deoxycytidine-3'-phosphorothioate
  modified_base 3: mod_base = OTHER; note = 2'-O-methyladenosine-3'-phosphate
  modified_base 4: mod_base = OTHER; note = 2'-O-methylguanosine-3'-phosphate
  modified_base 6: mod_base = OTHER; note = 2'-O-methylcytidine-3'-phosphate
  modified_base 8: mod_base = OTHER; note = 2'-O-methyladenosine-3'-phosphate
  modified_base 9: mod_base = OTHER; note = 2'-O-methylguanosine-3'-phosphate
  modified_base 10: mod_base = OTHER; note = 2'-O-methylguanosine-3'-phosphate
  modified_base 11: mod_base = OTHER; note = 2'-O-methyluridine-3'-phosphate
  modified_base 13: mod_base = OTHER; note = 2'-O-methylguanosine-3'-phosphate
  modified_base 14: mod_base = OTHER; note = 2'-fluoroguanosine-3'-phosphate
  modified_base 15: mod_base = OTHER; note = 2'-O-methyluridine-3'-phosphate
  modified_base 16: mod_base = OTHER; note = 2'-O-methylguanosine-3'-phosphate
  modified_base 17: mod_base = OTHER; note = 2'-O-methyladenosine-3'-phosphate
  modified_base 18: mod_base = OTHER; note = 2'-O-methyluridine-3'-phosphate
  modified_base 19: mod_base = OTHER; note = 2'-O-methylguanosine-3'-phosphate
  modified_base 20: mod_base = OTHER; note = 2'-O-methyluridine-3'-phosphate
  modified_base 21: mod_base = OTHER; note = 2'-O-methylguanosine-3'-phosphorothioate
  modified_base 22: mod_base = OTHER; note = 2'-O-methylguanosine-3'-phosphorothioate
  modified_base 23: mod_base = OTHER; note = 2'-O-methyluridine-3'-phosphate
  misc_feature 1: note = RNA
  misc_feature 2: note = DNA
  misc_feature 3..4: note = RNA
  misc_feature 5: note = DNA
  misc_feature 6: note = RNA
  misc_feature 7: note = DNA
  misc_feature 8..11: note = RNA
  misc_feature 12: note = DNA
  misc_feature 13..23: note = RNA
acagcccaggttggtgatgtggt

SEQ ID NO: 7418 - DNA, 23 bp, synthetic construct
  source 1..23: mol_type = other DNA
  modified_base 1: mod_base = OTHER; note = 2'-O-methyladenosine-3'-phosphorothioate
  modified_base 2: mod_base = OTHER; note = 2'-deoxycytidine-3'-phosphorothioate
  modified_base 3: mod_base = OTHER; note = 2'-O-methylcytidine-3'-phosphate
  modified_base 4: mod_base = OTHER; note = 2'-O-methyladenosine-3'-phosphate
  modified_base 6: mod_base = OTHER; note = 2'-O-methylcytidine-3'-phosphate
  modified_base 8: mod_base = OTHER; note = 2'-O-methylcytidine-3'-phosphate
  modified_base 9: mod_base = OTHER; note = 2'-O-methyladenosine-3'-phosphate
  modified_base 10: mod_base = OTHER; note = 2'-O-methylguanosine-3'-phosphate
  modified_base 11: mod_base = OTHER; note = 2'-O-methylguanosine-3'-phosphate
  modified_base 13: mod_base = OTHER; note = 2'-O-methyluridine-3'-phosphate
  modified_base 14: mod_base = OTHER; note = 2'-fluoroguanosine-3'-phosphate
  modified_base 15: mod_base = OTHER; note = 2'-O-methylguanosine-3'-phosphate
  modified_base 16: mod_base = OTHER; note = 2'-O-methyluridine-3'-phosphate
  modified_base 17: mod_base = OTHER; note = 2'-O-methylguanosine-3'-phosphate
  modified_base 18: mod_base = OTHER; note = 2'-O-methyladenosine-3'-phosphate
  modified_base 19: mod_base = OTHER; note = 2'-O-methyluridine-3'-phosphate
  modified_base 20: mod_base = OTHER; note = 2'-O-methylguanosine-3'-phosphate
  modified_base 21: mod_base = OTHER; note = 2'-O-methyluridine-3'-phosphorothioate
  modified_base 22: mod_base = OTHER; note = 2'-O-methylguanosine-3'-phosphorothioate
  modified_base 23: mod_base = OTHER; note = 2'-O-methylguanosine-3'-phosphate
  misc_feature 1: note = RNA
  misc_feature 2: note = DNA
  misc_feature 3..4: note = RNA
  misc_feature 5: note = DNA
  misc_feature 6: note = RNA
  misc_feature 7: note = DNA
  misc_feature 8..11: note = RNA
  misc_feature 12: note = DNA
  misc_feature 13..23: note = RNA
accagcccaggttggtgatgtgg

SEQ ID NO: 7419 - DNA, 23 bp, synthetic construct
  source 1..23: mol_type = other DNA
  modified_base 1: mod_base = OTHER; note = 2'-O-methyladenosine-3'-phosphorothioate
  modified_base 2: mod_base = OTHER; note = 2'-deoxythimidine-3'-phosphorothioate
  modified_base 3: mod_base = OTHER; note = 2'-O-methylguanosine-3'-phosphate
  modified_base 4: mod_base = OTHER; note = 2'-O-methylcytidine-3'-phosphate
  modified_base 6: mod_base = OTHER; note = 2'-O-methyladenosine-3'-phosphate
  modified_base 8: mod_base = OTHER; note = 2'-O-methylcytidine-3'-phosphate
  modified_base 9: mod_base = OTHER; note = 2'-O-methylcytidine-3'-phosphate
  modified_base 10: mod_base = OTHER; note = 2'-O-methylcytidine-3'-phosphate
  modified_base 11: mod_base = OTHER; note = 2'-O-methyladenosine-3'-phosphate
  modified_base 13: mod_base = OTHER; note = 2'-O-methylguanosine-3'-phosphate
  modified_base 14: mod_base = OTHER; note = 2'-fluorouridine-3'-phosphate
  modified_base 15: mod_base = OTHER; note = 2'-O-methyluridine-3'-phosphate
  modified_base 16: mod_base = OTHER; note = 2'-O-methylguanosine-3'-phosphate
  modified_base 17: mod_base = OTHER; note = 2'-O-methylguanosine-3'-phosphate
  modified_base 18: mod_base = OTHER; note = 2'-O-methyluridine-3'-phosphate
  modified_base 19: mod_base = OTHER; note = 2'-O-methylguanosine-3'-phosphate
  modified_base 20: mod_base = OTHER; note = 2'-O-methyladenosine-3'-phosphate
  modified_base 21: mod_base = OTHER; note = 2'-O-methyluridine-3'-phosphorothioate
  modified_base 22: mod_base = OTHER; note = 2'-O-methylguanosine-3'-phosphorothioate
  modified_base 23: mod_base = OTHER; note = 2'-O-methyluridine-3'-phosphate
  misc_feature 1: note = RNA
  misc_feature 2: note = DNA
  misc_feature 3..4: note = RNA
  misc_feature 5: note = DNA
  misc_feature 6: note = RNA
  misc_feature 7: note = DNA
  misc_feature 8..11: note = RNA
  misc_feature 12: note = DNA
  misc_feature 13..23: note = RNA
atgccagcccaggttggtgatgt

SEQ ID NO: 7420 - DNA, 23 bp, synthetic construct
  source 1..23: mol_type = other DNA
  modified_base 1: mod_base = OTHER; note = 2'-O-methyladenosine-3'-phosphorothioate
  modified_base 2: mod_base = OTHER; note = 2'-deoxyadenosine-3'-phosphorothioate
  modified_base 3: mod_base = OTHER; note = 2'-O-methyluridine-3'-phosphate
  modified_base 4: mod_base = OTHER; note = 2'-O-methylguanosine-3'-phosphate
  modified_base 6: mod_base = OTHER; note = 2'-O-methylcytidine-3'-phosphate
  modified_base 8: mod_base = OTHER; note = 2'-O-methylguanosine-3'-phosphate
  modified_base 9: mod_base = OTHER; note = 2'-O-methylcytidine-3'-phosphate
  modified_base 10: mod_base = OTHER; note = 2'-O-methylcytidine-3'-phosphate
  modified_base 11: mod_base = OTHER; note = 2'-O-methylcytidine-3'-phosphate
  modified_base 13: mod_base = OTHER; note = 2'-O-methylguanosine-3'-phosphate
  modified_base 14: mod_base = OTHER; note = 2'-fluoroguanosine-3'-phosphate
  modified_base 15: mod_base = OTHER; note = 2'-O-methyluridine-3'-phosphate
  modified_base 16: mod_base = OTHER; note = 2'-O-methyluridine-3'-phosphate
  modified_base 17: mod_base = OTHER; note = 2'-O-methylguanosine-3'-phosphate
  modified_base 18: mod_base = OTHER; note = 2'-O-methylguanosine-3'-phosphate
  modified_base 19: mod_base = OTHER; note = 2'-O-methyluridine-3'-phosphate
  modified_base 20: mod_base = OTHER; note = 2'-O-methylguanosine-3'-phosphate
  modified_base 21: mod_base = OTHER; note = 2'-O-methyladenosine-3'-phosphorothioate
  modified_base 22: mod_base = OTHER; note = 2'-O-methyluridine-3'-phosphorothioate
  modified_base 23: mod_base = OTHER; note = 2'-O-methylguanosine-3'-phosphate
  misc_feature 1: note = RNA
  misc_feature 2: note = DNA
  misc_feature 3..4: note = RNA
  misc_feature 5: note = DNA
  misc_feature 6: note = RNA
  misc_feature 7: note = DNA
  misc_feature 8..11: note = RNA
  misc_feature 12: note = DNA
  misc_feature 13..23: note = RNA
aatgccagcccaggttggtgatg

SEQ ID NO: 7421 - DNA, 23 bp, synthetic construct
  source 1..23: mol_type = other DNA
  modified_base 1: mod_base = OTHER; note = 2'-O-methyladenosine-3'-phosphorothioate
  modified_base 2: mod_base = OTHER; note = 2'-deoxythimidine-3'-phosphorothioate
  modified_base 3: mod_base = OTHER; note = 2'-O-methyladenosine-3'-phosphate
  modified_base 4: mod_base = OTHER; note = 2'-O-methylguanosine-3'-phosphate
  modified_base 6: mod_base = OTHER; note = 2'-O-methylguanosine-3'-phosphate
  modified_base 8: mod_base = OTHER; note = 2'-O-methylguanosine-3'-phosphate
  modified_base 9: mod_base = OTHER; note = 2'-O-methylcytidine-3'-phosphate
  modified_base 10: mod_base = OTHER; note = 2'-O-methyladenosine-3'-phosphate
  modified_base 11: mod_base = OTHER; note = 2'-O-methylguanosine-3'-phosphate
  modified_base 13: mod_base = OTHER; note = 2'-O-methylguanosine-3'-phosphate
  modified_base 14: mod_base = OTHER; note = 2'-fluorouridine-3'-phosphate
  modified_base 15: mod_base = OTHER; note = 2'-O-methyluridine-3'-phosphate
  modified_base 16: mod_base = OTHER; note = 2'-O-methyladenosine-3'-phosphate
  modified_base 17: mod_base = OTHER; note = 2'-O-methyladenosine-3'-phosphate
  modified_base 18: mod_base = OTHER; note = 2'-O-methylguanosine-3'-phosphate
  modified_base 19: mod_base = OTHER; note = 2'-O-methylguanosine-3'-phosphate
  modified_base 20: mod_base = OTHER; note = 2'-O-methyluridine-3'-phosphate
  modified_base 21: mod_base = OTHER; note = 2'-O-methyladenosine-3'-phosphorothioate
  modified_base 22: mod_base = OTHER; note = 2'-O-methyluridine-3'-phosphorothioate
  modified_base 23: mod_base = OTHER; note = 2'-O-methylguanosine-3'-phosphate
  misc_feature 1: note = RNA
  misc_feature 2: note = DNA
  misc_feature 3..4: note = RNA
  misc_feature 5: note = DNA
  misc_feature 6: note = RNA
  misc_feature 7: note = DNA
  misc_feature 8..11: note = RNA
  misc_feature 12: note = DNA
  misc_feature 13..23: note = RNA
atagagggcagagttaaggtatg

SEQ ID NO: 7422 - DNA, 23 bp, synthetic construct
  source 1..23: mol_type = other DNA
  modified_base 1: mod_base = OTHER; note = 2'-O-methyladenosine-3'-phosphorothioate
  modified_base 2: mod_base = OTHER; note = 2'-deoxycytidine-3'-phosphorothioate
  modified_base 3: mod_base = OTHER; note = 2'-O-methyluridine-3'-phosphate
  modified_base 4: mod_base = OTHER; note = 2'-O-methyladenosine-3'-phosphate
  modified_base 6: mod_base = OTHER; note = 2'-O-methyladenosine-3'-phosphate
  modified_base 8: mod_base = OTHER; note = 2'-O-methylguanosine-3'-phosphate
  modified_base 9: mod_base = OTHER; note = 2'-O-methylguanosine-3'-phosphate
  modified_base 10: mod_base = OTHER; note = 2'-O-methylcytidine-3'-phosphate
  modified_base 11: mod_base = OTHER; note = 2'-O-methyladenosine-3'-phosphate
  modified_base 13: mod_base = OTHER; note = 2'-O-methyladenosine-3'-phosphate
  modified_base 14: mod_base = OTHER; note = 2'-fluoroguanosine-3'-phosphate
  modified_base 15: mod_base = OTHER; note = 2'-O-methyluridine-3'-phosphate
  modified_base 16: mod_base = OTHER; note = 2'-O-methyluridine-3'-phosphate
  modified_base 17: mod_base = OTHER; note = 2'-O-methyladenosine-3'-phosphate
  modified_base 18: mod_base = OTHER; note = 2'-O-methyladenosine-3'-phosphate
  modified_base 19: mod_base = OTHER; note = 2'-O-methylguanosine-3'-phosphate
  modified_base 20: mod_base = OTHER; note = 2'-O-methylguanosine-3'-phosphate
  modified_base 21: mod_base = OTHER; note = 2'-O-methyluridine-3'-phosphorothioate
  modified_base 22: mod_base = OTHER; note = 2'-O-methyladenosine-3'-phosphorothioate
  modified_base 23: mod_base = OTHER; note = 2'-O-methyluridine-3'-phosphate
  misc_feature 1: note = RNA
  misc_feature 2: note = DNA
  misc_feature 3..4: note = RNA
  misc_feature 5: note = DNA
  misc_feature 6: note = RNA
  misc_feature 7: note = DNA
  misc_feature 8..11: note = RNA
  misc_feature 12: note = DNA
  misc_feature 13..23: note = RNA
actagagggcagagttaaggtat

SEQ ID NO: 7423 - DNA, 23 bp, synthetic construct
  source 1..23: mol_type = other DNA
  modified_base 1: mod_base = OTHER; note = 2'-O-methyladenosine-3'-phosphorothioate
  modified_base 2: mod_base = OTHER; note = 2'-deoxyadenosine-3'-phosphorothioate
  modified_base 3: mod_base = OTHER; note = 2'-O-methylcytidine-3'-phosphate
  modified_base 4: mod_base = OTHER; note = 2'-O-methyluridine-3'-phosphate
  modified_base 6: mod_base = OTHER; note = 2'-O-methylguanosine-3'-phosphate
  modified_base 8: mod_base = OTHER; note = 2'-O-methylguanosine-3'-phosphate
  modified_base 9: mod_base = OTHER; note = 2'-O-methylguanosine-3'-phosphate
  modified_base 10: mod_base = OTHER; note = 2'-O-methylguanosine-3'-phosphate
  modified_base 11: mod_base = OTHER; note = 2'-O-methylcytidine-3'-phosphate
  modified_base 13: mod_base = OTHER; note = 2'-O-methylguanosine-3'-phosphate
  modified_base 14: mod_base = OTHER; note = 2'-fluoroadenosine-3'-phosphate
  modified_base 15: mod_base = OTHER; note = 2'-O-methylguanosine-3'-phosphate
  modified_base 16: mod_base = OTHER; note = 2'-O-methyluridine-3'-phosphate
  modified_base 17: mod_base = OTHER; note = 2'-O-methyluridine-3'-phosphate
  modified_base 18: mod_base = OTHER; note = 2'-O-methyladenosine-3'-phosphate
  modified_base 19: mod_base = OTHER; note = 2'-O-methyladenosine-3'-phosphate
  modified_base 20: mod_base = OTHER; note = 2'-O-methylguanosine-3'-phosphate
  modified_base 21: mod_base = OTHER; note = 2'-O-methylguanosine-3'-phosphorothioate
  modified_base 22: mod_base = OTHER; note = 2'-O-methyluridine-3'-phosphorothioate
  modified_base 23: mod_base = OTHER; note = 2'-O-methyladenosine-3'-phosphate
  misc_feature 1: note = RNA
  misc_feature 2: note = DNA
  misc_feature 3..4: note = RNA
  misc_feature 5: note = DNA
  misc_feature 6: note = RNA
  misc_feature 7: note = DNA
  misc_feature 8..11: note = RNA
  misc_feature 12: note = DNA
  misc_feature 13..23: note = RNA
aactagagggcagagttaaggta

SEQ ID NO: 7424 - DNA, 23 bp, synthetic construct
  source 1..23: mol_type = other DNA
  modified_base 1: mod_base = OTHER; note = 2'-O-methyladenosine-3'-phosphorothioate
  modified_base 2: mod_base = OTHER; note = 2'-deoxycytidine-3'-phosphorothioate
  modified_base 3: mod_base = OTHER; note = 2'-O-methyladenosine-3'-phosphate
  modified_base 4: mod_base = OTHER; note = 2'-O-methylcytidine-3'-phosphate
  modified_base 6: mod_base = OTHER; note = 2'-O-methyladenosine-3'-phosphate
  modified_base 8: mod_base = OTHER; note = 2'-O-methyladenosine-3'-phosphate
  modified_base 9: mod_base = OTHER; note = 2'-O-methylguanosine-3'-phosphate
  modified_base 10: mod_base = OTHER; note = 2'-O-methylguanosine-3'-phosphate
  modified_base 11: mod_base = OTHER; note = 2'-O-methylguanosine-3'-phosphate
  modified_base 13: mod_base = OTHER; note = 2'-O-methyladenosine-3'-phosphate
  modified_base 14: mod_base = OTHER; note = 2'-fluoroguanosine-3'-phosphate
  modified_base 15: mod_base = OTHER; note = 2'-O-methyladenosine-3'-phosphate
  modified_base 16: mod_base = OTHER; note = 2'-O-methylguanosine-3'-phosphate
  modified_base 17: mod_base = OTHER; note = 2'-O-methyluridine-3'-phosphate
  modified_base 18: mod_base = OTHER; note = 2'-O-methyluridine-3'-phosphate
  modified_base 19: mod_base = OTHER; note = 2'-O-methyladenosine-3'-phosphate
  modified_base 20: mod_base = OTHER; note = 2'-O-methyladenosine-3'-phosphate
  modified_base 21: mod_base = OTHER; note = 2'-O-methylguanosine-3'-phosphorothioate
  modified_base 22: mod_base = OTHER; note = 2'-O-methylguanosine-3'-phosphorothioate
  modified_base 23: mod_base = OTHER; note = 2'-O-methyluridine-3'-phosphate
  misc_feature 1: note = RNA
  misc_feature 2: note = DNA
  misc_feature 3..4: note = RNA
  misc_feature 5: note = DNA
  misc_feature 6: note = RNA
  misc_feature 7: note = DNA
  misc_feature 8..11: note = RNA
  misc_feature 12: note = DNA
  misc_feature 13..23: note = RNA
acactagagggcagagttaaggt

SEQ ID NO: 7425 - DNA, 23 bp, synthetic construct
  source 1..23: mol_type = other DNA
  modified_base 1: mod_base = OTHER; note = 2'-O-methyladenosine-3'-phosphorothioate
  modified_base 2: mod_base = OTHER; note = 2'-deoxycytidine-3'-phosphorothioate
  modified_base 3: mod_base = OTHER; note = 2'-O-methylcytidine-3'-phosphate
  modified_base 4: mod_base = OTHER; note = 2'-O-methyladenosine-3'-phosphate
  modified_base 6: mod_base = OTHER; note = 2'-O-methyluridine-3'-phosphate
  modified_base 8: mod_base = OTHER; note = 2'-O-methylguanosine-3'-phosphate
  modified_base 9: mod_base = OTHER; note = 2'-O-methyladenosine-3'-phosphate
  modified_base 10: mod_base = OTHER; note = 2'-O-methylguanosine-3'-phosphate
  modified_base 11: mod_base = OTHER; note = 2'-O-methylguanosine-3'-phosphate
  modified_base 13: mod_base = OTHER; note = 2'-O-methylcytidine-3'-phosphate
  modified_base 14: mod_base = OTHER; note = 2'-fluoroadenosine-3'-phosphate
  modified_base 15: mod_base = OTHER; note = 2'-O-methylguanosine-3'-phosphate
  modified_base 16: mod_base = OTHER; note = 2'-O-methyladenosine-3'-phosphate
  modified_base 17: mod_base = OTHER; note = 2'-O-methylguanosine-3'-phosphate
  modified_base 18: mod_base = OTHER; note = 2'-O-methyluridine-3'-phosphate
  modified_base 19: mod_base = OTHER; note = 2'-O-methyluridine-3'-phosphate
  modified_base 20: mod_base = OTHER; note = 2'-O-methyladenosine-3'-phosphate
  modified_base 21: mod_base = OTHER; note = 2'-O-methyladenosine-3'-phosphorothioate
  modified_base 22: mod_base = OTHER; note = 2'-O-methylguanosine-3'-phosphorothioate
  modified_base 23: mod_base = OTHER; note = 2'-O-methylguanosine-3'-phosphate
  misc_feature 1: note = RNA
  misc_feature 2: note = DNA
  misc_feature 3..4: note = RNA
  misc_feature 5: note = DNA
  misc_feature 6: note = RNA
  misc_feature 7: note = DNA
  misc_feature 8..11: note = RNA
  misc_feature 12: note = DNA
  misc_feature 13..23: note = RNA
accactagagggcagagttaagg

SEQ ID NO: 7426 - DNA, 23 bp, synthetic construct
  source 1..23: mol_type = other DNA
  modified_base 1: mod_base = OTHER; note = 2'-O-methyladenosine-3'-phosphorothioate
  modified_base 2: mod_base = OTHER; note = 2'-deoxyguanosine-3'-phosphorothioate
  modified_base 3: mod_base = OTHER; note = 2'-O-methylcytidine-3'-phosphate
  modified_base 4: mod_base = OTHER; note = 2'-O-methylcytidine-3'-phosphate
  modified_base 6: mod_base = OTHER; note = 2'-O-methylcytidine-3'-phosphate
  modified_base 8: mod_base = OTHER; note = 2'-O-methyladenosine-3'-phosphate
  modified_base 9: mod_base = OTHER; note = 2'-O-methylguanosine-3'-phosphate
  modified_base 10: mod_base = OTHER; note = 2'-O-methyladenosine-3'-phosphate
  modified_base 11: mod_base = OTHER; note = 2'-O-methylguanosine-3'-phosphate
  modified_base 13: mod_base = OTHER; note = 2'-O-methylguanosine-3'-phosphate
  modified_base 14: mod_base = OTHER; note = 2'-fluorocytidine-3'-phosphate
  modified_base 15: mod_base = OTHER; note = 2'-O-methyladenosine-3'-phosphate
  modified_base 16: mod_base = OTHER; note = 2'-O-methylguanosine-3'-phosphate
  modified_base 17: mod_base = OTHER; note = 2'-O-methyladenosine-3'-phosphate
  modified_base 18: mod_base = OTHER; note = 2'-O-methylguanosine-3'-phosphate
  modified_base 19: mod_base = OTHER; note = 2'-O-methyluridine-3'-phosphate
  modified_base 20: mod_base = OTHER; note = 2'-O-methyluridine-3'-phosphate
  modified_base 21: mod_base = OTHER; note = 2'-O-methyladenosine-3'-phosphorothioate
  modified_base 22: mod_base = OTHER; note = 2'-O-methyladenosine-3'-phosphorothioate
  modified_base 23: mod_base = OTHER; note = 2'-O-methylguanosine-3'-phosphate
  misc_feature 1: note = RNA
  misc_feature 2: note = DNA
  misc_feature 3..4: note = RNA
  misc_feature 5: note = DNA
  misc_feature 6: note = RNA
  misc_feature 7: note = DNA
  misc_feature 8..11: note = RNA
  misc_feature 12: note = DNA
  misc_feature 13..23: note = RNA
agccactagagggcagagttaag

SEQ ID NO: 7427 - DNA, 23 bp, synthetic construct
  source 1..23: mol_type = other DNA
  modified_base 1: mod_base = OTHER; note = 2'-O-methyladenosine-3'-phosphorothioate
  modified_base 2: mod_base = OTHER; note = 2'-deoxyadenosine-3'-phosphorothioate
  modified_base 3: mod_base = OTHER; note = 2'-O-methylguanosine-3'-phosphate
  modified_base 4: mod_base = OTHER; note = 2'-O-methyluridine-3'-phosphate
  modified_base 6: mod_base = OTHER; note = 2'-O-methyluridine-3'-phosphate
  modified_base 8: mod_base = OTHER; note = 2'-O-methyladenosine-3'-phosphate
  modified_base 9: mod_base = OTHER; note = 2'-O-methylguanosine-3'-phosphate
  modified_base 10: mod_base = OTHER; note = 2'-O-methylguanosine-3'-phosphate
  modified_base 11: mod_base = OTHER; note = 2'-O-methyladenosine-3'-phosphate
  modified_base 13: mod_base = OTHER; note = 2'-O-methyladenosine-3'-phosphate
  modified_base 14: mod_base = OTHER; note = 2'-fluorocytidine-3'-phosphate
  modified_base 15: mod_base = OTHER; note = 2'-O-methylcytidine-3'-phosphate
  modified_base 16: mod_base = OTHER; note = 2'-O-methyladenosine-3'-phosphate
  modified_base 17: mod_base = OTHER; note = 2'-O-methylguanosine-3'-phosphate
  modified_base 18: mod_base = OTHER; note = 2'-O-methyladenosine-3'-phosphate
  modified_base 19: mod_base = OTHER; note = 2'-O-methylcytidine-3'-phosphate
  modified_base 20: mod_base = OTHER; note = 2'-O-methyluridine-3'-phosphate
  modified_base 21: mod_base = OTHER; note = 2'-O-methyluridine-3'-phosphorothioate
  modified_base 22: mod_base = OTHER; note = 2'-O-methylcytidine-3'-phosphorothioate
  modified_base 23: mod_base = OTHER; note = 2'-O-methyluridine-3'-phosphate
  misc_feature 1: note = RNA
  misc_feature 2: note = DNA
  misc_feature 3..4: note = RNA
  misc_feature 5: note = DNA
  misc_feature 6: note = RNA
  misc_feature 7: note = DNA
  misc_feature 8..11: note = RNA
  misc_feature 12: note = DNA
  misc_feature 13..23: note = RNA
aagtttcaggacaccagacttct

SEQ ID NO: 7428 - DNA, 23 bp, synthetic construct
  source 1..23: mol_type = other DNA
  modified_base 1: mod_base = OTHER; note = 2'-O-methyladenosine-3'-phosphorothioate
  modified_base 2: mod_base = OTHER; note = 2'-deoxycytidine-3'-phosphorothioate
  modified_base 3: mod_base = OTHER; note = 2'-O-methyladenosine-3'-phosphate
  modified_base 4: mod_base = OTHER; note = 2'-O-methylguanosine-3'-phosphate
  modified_base 6: mod_base = OTHER; note = 2'-O-methyluridine-3'-phosphate
  modified_base 8: mod_base = OTHER; note = 2'-O-methylcytidine-3'-phosphate
  modified_base 9: mod_base = OTHER; note = 2'-O-methyladenosine-3'-phosphate
  modified_base 10: mod_base = OTHER; note = 2'-O-methylguanosine-3'-phosphate
  modified_base 11: mod_base = OTHER; note = 2'-O-methylguanosine-3'-phosphate
  modified_base 13: mod_base = OTHER; note = 2'-O-methylcytidine-3'-phosphate
  modified_base 14: mod_base = OTHER; note = 2'-fluoroadenosine-3'-phosphate
  modified_base 15: mod_base = OTHER; note = 2'-O-methylcytidine-3'-phosphate
  modified_base 16: mod_base = OTHER; note = 2'-O-methylcytidine-3'-phosphate
  modified_base 17: mod_base = OTHER; note = 2'-O-methyladenosine-3'-phosphate
  modified_base 18: mod_base = OTHER; note = 2'-O-methylguanosine-3'-phosphate
  modified_base 19: mod_base = OTHER; note = 2'-O-methyladenosine-3'-phosphate
  modified_base 20: mod_base = OTHER; note = 2'-O-methylcytidine-3'-phosphate
  modified_base 21: mod_base = OTHER; note = 2'-O-methyluridine-3'-phosphorothioate
  modified_base 22: mod_base = OTHER; note = 2'-O-methyluridine-3'-phosphorothioate
  modified_base 23: mod_base = OTHER; note = 2'-O-methylcytidine-3'-phosphate
  misc_feature 1: note = RNA
  misc_feature 2: note = DNA
  misc_feature 3..4: note = RNA
  misc_feature 5: note = DNA
  misc_feature 6: note = RNA
  misc_feature 7: note = DNA
  misc_feature 8..11: note = RNA
  misc_feature 12: note = DNA
  misc_feature 13..23: note = RNA
acagtttcaggacaccagacttc

SEQ ID NO: 7429 - DNA, 23 bp, synthetic construct
  source 1..23: mol_type = other DNA
  modified_base 1: mod_base = OTHER; note = 2'-O-methyladenosine-3'-phosphorothioate
  modified_base 2: mod_base = OTHER; note = 2'-deoxyguanosine-3'-phosphorothioate
  modified_base 3: mod_base = OTHER; note = 2'-O-methylcytidine-3'-phosphate
  modified_base 4: mod_base = OTHER; note = 2'-O-methyladenosine-3'-phosphate
  modified_base 6: mod_base = OTHER; note = 2'-O-methyluridine-3'-phosphate
  modified_base 8: mod_base = OTHER; note = 2'-O-methyluridine-3'-phosphate
  modified_base 9: mod_base = OTHER; note = 2'-O-methylcytidine-3'-phosphate
  modified_base 10: mod_base = OTHER; note = 2'-O-methyladenosine-3'-phosphate
  modified_base 11: mod_base = OTHER; note = 2'-O-methylguanosine-3'-phosphate
  modified_base 13: mod_base = OTHER; note = 2'-O-methyladenosine-3'-phosphate
  modified_base 14: mod_base = OTHER; note = 2'-fluorocytidine-3'-phosphate
  modified_base 15: mod_base = OTHER; note = 2'-O-methyladenosine-3'-phosphate
  modified_base 16: mod_base = OTHER; note = 2'-O-methylcytidine-3'-phosphate
  modified_base 17: mod_base = OTHER; note = 2'-O-methylcytidine-3'-phosphate
  modified_base 18: mod_base = OTHER; note = 2'-O-methyladenosine-3'-phosphate
  modified_base 19: mod_base = OTHER; note = 2'-O-methylguanosine-3'-phosphate
  modified_base 20: mod_base = OTHER; note = 2'-O-methyladenosine-3'-phosphate
  modified_base 21: mod_base = OTHER; note = 2'-O-methylcytidine-3'-phosphorothioate
  modified_base 22: mod_base = OTHER; note = 2'-O-methyluridine-3'-phosphorothioate
  modified_base 23: mod_base = OTHER; note = 2'-O-methyluridine-3'-phosphate
  misc_feature 1: note = RNA
  misc_feature 2: note = DNA
  misc_feature 3..4: note = RNA
  misc_feature 5: note = DNA
  misc_feature 6: note = RNA
  misc_feature 7: note = DNA
  misc_feature 8..11: note = RNA
  misc_feature 12: note = DNA
  misc_feature 13..23: note = RNA
agcagtttcaggacaccagactt

SEQ ID NO: 7430 - DNA, 23 bp, synthetic construct
  source 1..23: mol_type = other DNA
  modified_base 1: mod_base = OTHER; note = 2'-O-methyladenosine-3'-phosphorothioate
  modified_base 2: mod_base = OTHER; note = 2'-deoxythimidine-3'-phosphorothioate
  modified_base 3: mod_base = OTHER; note = 2'-O-methylguanosine-3'-phosphate
  modified_base 4: mod_base = OTHER; note = 2'-O-methylcytidine-3'-phosphate
  modified_base 6: mod_base = OTHER; note = 2'-O-methylguanosine-3'-phosphate
  modified_base 8: mod_base = OTHER; note = 2'-O-methyluridine-3'-phosphate
  modified_base 9: mod_base = OTHER; note = 2'-O-methyluridine-3'-phosphate
  modified_base 10: mod_base = OTHER; note = 2'-O-methylcytidine-3'-phosphate
  modified_base 11: mod_base = OTHER; note = 2'-O-methyladenosine-3'-phosphate
  modified_base 13: mod_base = OTHER; note = 2'-O-methylguanosine-3'-phosphate
  modified_base 14: mod_base = OTHER; note = 2'-fluoroadenosine-3'-phosphate
  modified_base 15: mod_base = OTHER; note = 2'-O-methylcytidine-3'-phosphate
  modified_base 16: mod_base = OTHER; note = 2'-O-methyladenosine-3'-phosphate
  modified_base 17: mod_base = OTHER; note = 2'-O-methylcytidine-3'-phosphate
  modified_base 18: mod_base = OTHER; note = 2'-O-methylcytidine-3'-phosphate
  modified_base 19: mod_base = OTHER; note = 2'-O-methyladenosine-3'-phosphate
  modified_base 20: mod_base = OTHER; note = 2'-O-methylguanosine-3'-phosphate
  modified_base 21: mod_base = OTHER; note = 2'-O-methyladenosine-3'-phosphorothioate
  modified_base 22: mod_base = OTHER; note = 2'-O-methylcytidine-3'-phosphorothioate
  modified_base 23: mod_base = OTHER; note = 2'-O-methyluridine-3'-phosphate
  misc_feature 1: note = RNA
  misc_feature 2: note = DNA
  misc_feature 3..4: note = RNA
  misc_feature 5: note = DNA
  misc_feature 6: note = RNA
  misc_feature 7: note = DNA
  misc_feature 8..11: note = RNA
  misc_feature 12: note = DNA
  misc_feature 13..23: note = RNA
atgcagtttcaggacaccagact

SEQ ID NO: 7431 - DNA, 23 bp, synthetic construct
  source 1..23: mol_type = other DNA
  modified_base 1: mod_base = OTHER; note = 2'-O-methyladenosine-3'-phosphorothioate
  modified_base 2: mod_base = OTHER; note = 2'-deoxythimidine-3'-phosphorothioate
  modified_base 3: mod_base = OTHER; note = 2'-O-methyluridine-3'-phosphate
  modified_base 4: mod_base = OTHER; note = 2'-O-methylguanosine-3'-phosphate
  modified_base 6: mod_base = OTHER; note = 2'-O-methyladenosine-3'-phosphate
  modified_base 8: mod_base = OTHER; note = 2'-O-methyluridine-3'-phosphate
  modified_base 9: mod_base = OTHER; note = 2'-O-methyluridine-3'-phosphate
  modified_base 10: mod_base = OTHER; note = 2'-O-methyluridine-3'-phosphate
  modified_base 11: mod_base = OTHER; note = 2'-O-methylcytidine-3'-phosphate
  modified_base 13: mod_base = OTHER; note = 2'-O-methylguanosine-3'-phosphate
  modified_base 14: mod_base = OTHER; note = 2'-fluoroguanosine-3'-phosphate
  modified_base 15: mod_base = OTHER; note = 2'-O-methyladenosine-3'-phosphate
  modified_base 16: mod_base = OTHER; note = 2'-O-methylcytidine-3'-phosphate
  modified_base 17: mod_base = OTHER; note = 2'-O-methyladenosine-3'-phosphate
  modified_base 18: mod_base = OTHER; note = 2'-O-methylcytidine-3'-phosphate
  modified_base 19: mod_base = OTHER; note = 2'-O-methylcytidine-3'-phosphate
  modified_base 20: mod_base = OTHER; note = 2'-O-methyladenosine-3'-phosphate
  modified_base 21: mod_base = OTHER; note = 2'-O-methylguanosine-3'-phosphorothioate
  modified_base 22: mod_base = OTHER; note = 2'-O-methyladenosine-3'-phosphorothioate
  modified_base 23: mod_base = OTHER; note = 2'-O-methylcytidine-3'-phosphate
  misc_feature 1: note = RNA
  misc_feature 2: note = DNA
  misc_feature 3..4: note = RNA
  misc_feature 5: note = DNA
  misc_feature 6: note = RNA
  misc_feature 7: note = DNA
  misc_feature 8..11: note = RNA
  misc_feature 12: note = DNA
  misc_feature 13..23: note = RNA
attgcagtttcaggacaccagac

SEQ ID NO: 7432 - DNA, 23 bp, synthetic construct
  source 1..23: mol_type = other DNA
  modified_base 1: mod_base = OTHER; note = 2'-O-methyladenosine-3'-phosphorothioate
  modified_base 2: mod_base = OTHER; note = 2'-deoxyguanosine-3'-phosphorothioate
  modified_base 3: mod_base = OTHER; note = 2'-O-methyluridine-3'-phosphate
  modified_base 4: mod_base = OTHER; note = 2'-O-methyluridine-3'-phosphate
  modified_base 6: mod_base = OTHER; note = 2'-O-methylcytidine-3'-phosphate
  modified_base 8: mod_base = OTHER; note = 2'-O-methylguanosine-3'-phosphate
  modified_base 9: mod_base = OTHER; note = 2'-O-methyluridine-3'-phosphate
  modified_base 10: mod_base = OTHER; note = 2'-O-methyluridine-3'-phosphate
  modified_base 11: mod_base = OTHER; note = 2'-O-methyluridine-3'-phosphate
  modified_base 13: mod_base = OTHER; note = 2'-O-methyladenosine-3'-phosphate
  modified_base 14: mod_base = OTHER; note = 2'-fluoroguanosine-3'-phosphate
  modified_base 15: mod_base = OTHER; note = 2'-O-methylguanosine-3'-phosphate
  modified_base 16: mod_base = OTHER; note = 2'-O-methyladenosine-3'-phosphate
  modified_base 17: mod_base = OTHER; note = 2'-O-methylcytidine-3'-phosphate
  modified_base 18: mod_base = OTHER; note = 2'-O-methyladenosine-3'-phosphate
  modified_base 19: mod_base = OTHER; note = 2'-O-methylcytidine-3'-phosphate
  modified_base 20: mod_base = OTHER; note = 2'-O-methylcytidine-3'-phosphate
  modified_base 21: mod_base = OTHER; note = 2'-O-methyladenosine-3'-phosphorothioate
  modified_base 22: mod_base = OTHER; note = 2'-O-methylguanosine-3'-phosphorothioate
  modified_base 23: mod_base = OTHER; note = 2'-O-methyladenosine-3'-phosphate
  misc_feature 1: note = RNA
  misc_feature 2: note = DNA
  misc_feature 3..4: note = RNA
  misc_feature 5: note = DNA
  misc_feature 6: note = RNA
  misc_feature 7: note = DNA
  misc_feature 8..11: note = RNA
  misc_feature 12: note = DNA
  misc_feature 13..23: note = RNA
agttgcagtttcaggacaccaga

SEQ ID NO: 7433 - DNA, 23 bp, synthetic construct
  source 1..23: mol_type = other DNA
  modified_base 1: mod_base = OTHER; note = 2'-O-methyladenosine-3'-phosphorothioate
  modified_base 2: mod_base = OTHER; note = 2'-deoxyadenosine-3'-phosphorothioate
  modified_base 3: mod_base = OTHER; note = 2'-O-methylguanosine-3'-phosphate
  modified_base 4: mod_base = OTHER; note = 2'-O-methyluridine-3'-phosphate
  modified_base 6: mod_base = OTHER; note = 2'-O-methylguanosine-3'-phosphate
  modified_base 8: mod_base = OTHER; note = 2'-O-methyladenosine-3'-phosphate
  modified_base 9: mod_base = OTHER; note = 2'-O-methylguanosine-3'-phosphate
  modified_base 10: mod_base = OTHER; note = 2'-O-methyluridine-3'-phosphate
  modified_base 11: mod_base = OTHER; note = 2'-O-methyluridine-3'-phosphate
  modified_base 13: mod_base = OTHER; note = 2'-O-methylcytidine-3'-phosphate
  modified_base 14: mod_base = OTHER; note = 2'-fluoroadenosine-3'-phosphate
  modified_base 15: mod_base = OTHER; note = 2'-O-methylguanosine-3'-phosphate
  modified_base 16: mod_base = OTHER; note = 2'-O-methylguanosine-3'-phosphate
  modified_base 17: mod_base = OTHER; note = 2'-O-methyladenosine-3'-phosphate
  modified_base 18: mod_base = OTHER; note = 2'-O-methylcytidine-3'-phosphate
  modified_base 19: mod_base = OTHER; note = 2'-O-methyladenosine-3'-phosphate
  modified_base 20: mod_base = OTHER; note = 2'-O-methylcytidine-3'-phosphate
  modified_base 21: mod_base = OTHER; note = 2'-O-methylcytidine-3'-phosphorothioate
  modified_base 22: mod_base = OTHER; note = 2'-O-methyladenosine-3'-phosphorothioate
  modified_base 23: mod_base = OTHER; note = 2'-O-methylguanosine-3'-phosphate
  misc_feature 1: note = RNA
  misc_feature 2: note = DNA
  misc_feature 3..4: note = RNA
  misc_feature 5: note = DNA
  misc_feature 6: note = RNA
  misc_feature 7: note = DNA
  misc_feature 8..11: note = RNA
  misc_feature 12: note = DNA
  misc_feature 13..23: note = RNA
aagttgcagtttcaggacaccag

SEQ ID NO: 7434 - DNA, 23 bp, synthetic construct
  source 1..23: mol_type = other DNA
  modified_base 1: mod_base = OTHER; note = 2'-O-methyladenosine-3'-phosphorothioate
  modified_base 2: mod_base = OTHER; note = 2'-deoxythimidine-3'-phosphorothioate
  modified_base 3: mod_base = OTHER; note = 2'-O-methyladenosine-3'-phosphate
  modified_base 4: mod_base = OTHER; note = 2'-O-methylguanosine-3'-phosphate
  modified_base 6: mod_base = OTHER; note = 2'-O-methyluridine-3'-phosphate
  modified_base 8: mod_base = OTHER; note = 2'-O-methylcytidine-3'-phosphate
  modified_base 9: mod_base = OTHER; note = 2'-O-methyladenosine-3'-phosphate
  modified_base 10: mod_base = OTHER; note = 2'-O-methylguanosine-3'-phosphate
  modified_base 11: mod_base = OTHER; note = 2'-O-methyluridine-3'-phosphate
  modified_base 13: mod_base = OTHER; note = 2'-O-methyluridine-3'-phosphate
  modified_base 14: mod_base = OTHER; note = 2'-fluorocytidine-3'-phosphate
  modified_base 15: mod_base = OTHER; note = 2'-O-methyladenosine-3'-phosphate
  modified_base 16: mod_base = OTHER; note = 2'-O-methylguanosine-3'-phosphate
  modified_base 17: mod_base = OTHER; note = 2'-O-methylguanosine-3'-phosphate
  modified_base 18: mod_base = OTHER; note = 2'-O-methyladenosine-3'-phosphate
  modified_base 19: mod_base = OTHER; note = 2'-O-methylcytidine-3'-phosphate
  modified_base 20: mod_base = OTHER; note = 2'-O-methyladenosine-3'-phosphate
  modified_base 21: mod_base = OTHER; note = 2'-O-methylcytidine-3'-phosphorothioate
  modified_base 22: mod_base = OTHER; note = 2'-O-methylcytidine-3'-phosphorothioate
  modified_base 23: mod_base = OTHER; note = 2'-O-methyladenosine-3'-phosphate
  misc_feature 1: note = RNA
  misc_feature 2: note = DNA
  misc_feature 3..4: note = RNA
  misc_feature 5: note = DNA
  misc_feature 6: note = RNA
  misc_feature 7: note = DNA
  misc_feature 8..11: note = RNA
  misc_feature 12: note = DNA
  misc_feature 13..23: note = RNA
atagttgcagtttcaggacacca

SEQ ID NO: 7435 - DNA, 23 bp, synthetic construct
  source 1..23: mol_type = other DNA
  modified_base 1: mod_base = OTHER; note = 2'-O-methyladenosine-3'-phosphorothioate
  modified_base 2: mod_base = OTHER; note = 2'-deoxycytidine-3'-phosphorothioate
  modified_base 3: mod_base = OTHER; note = 2'-O-methyluridine-3'-phosphate
  modified_base 4: mod_base = OTHER; note = 2'-O-methyladenosine-3'-phosphate
  modified_base 6: mod_base = OTHER; note = 2'-O-methyluridine-3'-phosphate
  modified_base 8: mod_base = OTHER; note = 2'-O-methylguanosine-3'-phosphate
  modified_base 9: mod_base = OTHER; note = 2'-O-methylcytidine-3'-phosphate
  modified_base 10: mod_base = OTHER; note = 2'-O-methyladenosine-3'-phosphate
  modified_base 11: mod_base = OTHER; note = 2'-O-methylguanosine-3'-phosphate
  modified_base 13: mod_base = OTHER; note = 2'-O-methyluridine-3'-phosphate
  modified_base 14: mod_base = OTHER; note = 2'-fluorouridine-3'-phosphate
  modified_base 15: mod_base = OTHER; note = 2'-O-methylcytidine-3'-phosphate
  modified_base 16: mod_base = OTHER; note = 2'-O-methyladenosine-3'-phosphate
  modified_base 17: mod_base = OTHER; note = 2'-O-methylguanosine-3'-phosphate
  modified_base 18: mod_base = OTHER; note = 2'-O-methylguanosine-3'-phosphate
  modified_base 19: mod_base = OTHER; note = 2'-O-methyladenosine-3'-phosphate
  modified_base 20: mod_base = OTHER; note = 2'-O-methylcytidine-3'-phosphate
  modified_base 21: mod_base = OTHER; note = 2'-O-methyladenosine-3'-phosphorothioate
  modified_base 22: mod_base = OTHER; note = 2'-O-methylcytidine-3'-phosphorothioate
  modified_base 23: mod_base = OTHER; note = 2'-O-methylcytidine-3'-phosphate
  misc_feature 1: note = RNA
  misc_feature 2: note = DNA
  misc_feature 3..4: note = RNA
  misc_feature 5: note = DNA
  misc_feature 6: note = RNA
  misc_feature 7: note = DNA
  misc_feature 8..11: note = RNA
  misc_feature 12: note = DNA
  misc_feature 13..23: note = RNA
actagttgcagtttcaggacacc

SEQ ID NO: 7436 - DNA, 23 bp, synthetic construct
  source 1..23: mol_type = other DNA
  modified_base 1: mod_base = OTHER; note = 2'-O-methyladenosine-3'-phosphorothioate
  modified_base 2: mod_base = OTHER; note = 2'-deoxythimidine-3'-phosphorothioate
  modified_base 3: mod_base = OTHER; note = 2'-O-methylcytidine-3'-phosphate
  modified_base 4: mod_base = OTHER; note = 2'-O-methyluridine-3'-phosphate
  modified_base 6: mod_base = OTHER; note = 2'-O-methylguanosine-3'-phosphate
  modified_base 8: mod_base = OTHER; note = 2'-O-methyluridine-3'-phosphate
  modified_base 9: mod_base = OTHER; note = 2'-O-methylguanosine-3'-phosphate
  modified_base 10: mod_base = OTHER; note = 2'-O-methylcytidine-3'-phosphate
  modified_base 11: mod_base = OTHER; note = 2'-O-methyladenosine-3'-phosphate
  modified_base 13: mod_base = OTHER; note = 2'-O-methyluridine-3'-phosphate
  modified_base 14: mod_base = OTHER; note = 2'-fluorouridine-3'-phosphate
  modified_base 15: mod_base = OTHER; note = 2'-O-methyluridine-3'-phosphate
  modified_base 16: mod_base = OTHER; note = 2'-O-methylcytidine-3'-phosphate
  modified_base 17: mod_base = OTHER; note = 2'-O-methyladenosine-3'-phosphate
  modified_base 18: mod_base = OTHER; note = 2'-O-methylguanosine-3'-phosphate
  modified_base 19: mod_base = OTHER; note = 2'-O-methylguanosine-3'-phosphate
  modified_base 20: mod_base = OTHER; note = 2'-O-methyladenosine-3'-phosphate
  modified_base 21: mod_base = OTHER; note = 2'-O-methylcytidine-3'-phosphorothioate
  modified_base 22: mod_base = OTHER; note = 2'-O-methyladenosine-3'-phosphorothioate
  modified_base 23: mod_base = OTHER; note = 2'-O-methylcytidine-3'-phosphate
  misc_feature 1: note = RNA
  misc_feature 2: note = DNA
  misc_feature 3..4: note = RNA
  misc_feature 5: note = DNA
  misc_feature 6: note = RNA
  misc_feature 7: note = DNA
  misc_feature 8..11: note = RNA
  misc_feature 12: note = DNA
  misc_feature 13..23: note = RNA
atctagttgcagtttcaggacac

SEQ ID NO: 7437 - DNA, 23 bp, synthetic construct
  source 1..23: mol_type = other DNA
  modified_base 1: mod_base = OTHER; note = 2'-O-methyladenosine-3'-phosphorothioate
  modified_base 2: mod_base = OTHER; note = 2'-deoxyguanosine-3'-phosphorothioate
  modified_base 3: mod_base = OTHER; note = 2'-O-methyluridine-3'-phosphate
  modified_base 4: mod_base = OTHER; note = 2'-O-methylcytidine-3'-phosphate
  modified_base 6: mod_base = OTHER; note = 2'-O-methyladenosine-3'-phosphate
  modified_base 8: mod_base = OTHER; note = 2'-O-methyluridine-3'-phosphate
  modified_base 9: mod_base = OTHER; note = 2'-O-methyluridine-3'-phosphate
  modified_base 10: mod_base = OTHER; note = 2'-O-methylguanosine-3'-phosphate
  modified_base 11: mod_base = OTHER; note = 2'-O-methylcytidine-3'-phosphate
  modified_base 13: mod_base = OTHER; note = 2'-O-methylguanosine-3'-phosphate
  modified_base 14: mod_base = OTHER; note = 2'-fluorouridine-3'-phosphate
  modified_base 15: mod_base = OTHER; note = 2'-O-methyluridine-3'-phosphate
  modified_base 16: mod_base = OTHER; note = 2'-O-methyluridine-3'-phosphate
  modified_base 17: mod_base = OTHER; note = 2'-O-methylcytidine-3'-phosphate
  modified_base 18: mod_base = OTHER; note = 2'-O-methyladenosine-3'-phosphate
  modified_base 19: mod_base = OTHER; note = 2'-O-methylguanosine-3'-phosphate
  modified_base 20: mod_base = OTHER; note = 2'-O-methylguanosine-3'-phosphate
  modified_base 21: mod_base = OTHER; note = 2'-O-methyladenosine-3'-phosphorothioate
  modified_base 22: mod_base = OTHER; note = 2'-O-methylcytidine-3'-phosphorothioate
  modified_base 23: mod_base = OTHER; note = 2'-O-methyladenosine-3'-phosphate
  misc_feature 1: note = RNA
  misc_feature 2: note = DNA
  misc_feature 3..4: note = RNA
  misc_feature 5: note = DNA
  misc_feature 6: note = RNA
  misc_feature 7: note = DNA
  misc_feature 8..11: note = RNA
  misc_feature 12: note = DNA
  misc_feature 13..23: note = RNA
agtctagttgcagtttcaggaca

SEQ ID NO: 7438 - DNA, 23 bp, synthetic construct
  source 1..23: mol_type = other DNA
  modified_base 1: mod_base = OTHER; note = 2'-O-methyladenosine-3'-phosphorothioate
  modified_base 2: mod_base = OTHER; note = 2'-deoxyadenosine-3'-phosphorothioate
  modified_base 3: mod_base = OTHER; note = 2'-O-methylguanosine-3'-phosphate
  modified_base 4: mod_base = OTHER; note = 2'-O-methyluridine-3'-phosphate
  modified_base 6: mod_base = OTHER; note = 2'-O-methyluridine-3'-phosphate
  modified_base 8: mod_base = OTHER; note = 2'-O-methylguanosine-3'-phosphate
  modified_base 9: mod_base = OTHER; note = 2'-O-methyluridine-3'-phosphate
  modified_base 10: mod_base = OTHER; note = 2'-O-methyluridine-3'-phosphate
  modified_base 11: mod_base = OTHER; note = 2'-O-methylguanosine-3'-phosphate
  modified_base 13: mod_base = OTHER; note = 2'-O-methyladenosine-3'-phosphate
  modified_base 14: mod_base = OTHER; note = 2'-fluoroguanosine-3'-phosphate
  modified_base 15: mod_base = OTHER; note = 2'-O-methyluridine-3'-phosphate
  modified_base 16: mod_base = OTHER; note = 2'-O-methyluridine-3'-phosphate
  modified_base 17: mod_base = OTHER; note = 2'-O-methyluridine-3'-phosphate
  modified_base 18: mod_base = OTHER; note = 2'-O-methylcytidine-3'-phosphate
  modified_base 19: mod_base = OTHER; note = 2'-O-methyladenosine-3'-phosphate
  modified_base 20: mod_base = OTHER; note = 2'-O-methylguanosine-3'-phosphate
  modified_base 21: mod_base = OTHER; note = 2'-O-methylguanosine-3'-phosphorothioate
  modified_base 22: mod_base = OTHER; note = 2'-O-methyladenosine-3'-phosphorothioate
  modified_base 23: mod_base = OTHER; note = 2'-O-methylcytidine-3'-phosphate
  misc_feature 1: note = RNA
  misc_feature 2: note = DNA
  misc_feature 3..4: note = RNA
  misc_feature 5: note = DNA
  misc_feature 6: note = RNA
  misc_feature 7: note = DNA
  misc_feature 8..11: note = RNA
  misc_feature 12: note = DNA
  misc_feature 13..23: note = RNA
aagtctagttgcagtttcaggac

SEQ ID NO: 7439 - DNA, 23 bp, synthetic construct
  source 1..23: mol_type = other DNA
  modified_base 1: mod_base = OTHER; note = 2'-O-methyladenosine-3'-phosphorothioate
  modified_base 2: mod_base = OTHER; note = 2'-deoxycytidine-3'-phosphorothioate
  modified_base 3: mod_base = OTHER; note = 2'-O-methyladenosine-3'-phosphate
  modified_base 4: mod_base = OTHER; note = 2'-O-methylguanosine-3'-phosphate
  modified_base 6: mod_base = OTHER; note = 2'-O-methylcytidine-3'-phosphate
  modified_base 8: mod_base = OTHER; note = 2'-O-methyladenosine-3'-phosphate
  modified_base 9: mod_base = OTHER; note = 2'-O-methylguanosine-3'-phosphate
  modified_base 10: mod_base = OTHER; note = 2'-O-methyluridine-3'-phosphate
  modified_base 11: mod_base = OTHER; note = 2'-O-methyluridine-3'-phosphate
  modified_base 13: mod_base = OTHER; note = 2'-O-methylcytidine-3'-phosphate
  modified_base 14: mod_base = OTHER; note = 2'-fluoroadenosine-3'-phosphate
  modified_base 15: mod_base = OTHER; note = 2'-O-methylguanosine-3'-phosphate
  modified_base 16: mod_base = OTHER; note = 2'-O-methyluridine-3'-phosphate
  modified_base 17: mod_base = OTHER; note = 2'-O-methyluridine-3'-phosphate
  modified_base 18: mod_base = OTHER; note = 2'-O-methyluridine-3'-phosphate
  modified_base 19: mod_base = OTHER; note = 2'-O-methylcytidine-3'-phosphate
  modified_base 20: mod_base = OTHER; note = 2'-O-methyladenosine-3'-phosphate
  modified_base 21: mod_base = OTHER; note = 2'-O-methylguanosine-3'-phosphorothioate
  modified_base 22: mod_base = OTHER; note = 2'-O-methylguanosine-3'-phosphorothioate
  modified_base 23: mod_base = OTHER; note = 2'-O-methyladenosine-3'-phosphate
  misc_feature 1: note = RNA
  misc_feature 2: note = DNA
  misc_feature 3..4: note = RNA
  misc_feature 5: note = DNA
  misc_feature 6: note = RNA
  misc_feature 7: note = DNA
  misc_feature 8..11: note = RNA
  misc_feature 12: note = DNA
  misc_feature 13..23: note = RNA
acagtctagttgcagtttcagga

SEQ ID NO: 7440 - DNA, 23 bp, synthetic construct
  source 1..23: mol_type = other DNA
  modified_base 1: mod_base = OTHER; note = 2'-O-methyladenosine-3'-phosphorothioate
  modified_base 2: mod_base = OTHER; note = 2'-deoxyguanosine-3'-phosphorothioate
  modified_base 3: mod_base = OTHER; note = 2'-O-methylcytidine-3'-phosphate
  modified_base 4: mod_base = OTHER; note = 2'-O-methyladenosine-3'-phosphate
  modified_base 6: mod_base = OTHER; note = 2'-O-methyluridine-3'-phosphate
  modified_base 8: mod_base = OTHER; note = 2'-O-methyluridine-3'-phosphate
  modified_base 9: mod_base = OTHER; note = 2'-O-methyladenosine-3'-phosphate
  modified_base 10: mod_base = OTHER; note = 2'-O-methylguanosine-3'-phosphate
  modified_base 11: mod_base = OTHER; note = 2'-O-methyluridine-3'-phosphate
  modified_base 13: mod_base = OTHER; note = 2'-O-methylguanosine-3'-phosphate
  modified_base 14: mod_base = OTHER; note = 2'-fluorocytidine-3'-phosphate
  modified_base 15: mod_base = OTHER; note = 2'-O-methyladenosine-3'-phosphate
  modified_base 16: mod_base = OTHER; note = 2'-O-methylguanosine-3'-phosphate
  modified_base 17: mod_base = OTHER; note = 2'-O-methyluridine-3'-phosphate
  modified_base 18: mod_base = OTHER; note = 2'-O-methyluridine-3'-phosphate
  modified_base 19: mod_base = OTHER; note = 2'-O-methyluridine-3'-phosphate
  modified_base 20: mod_base = OTHER; note = 2'-O-methylcytidine-3'-phosphate
  modified_base 21: mod_base = OTHER; note = 2'-O-methyladenosine-3'-phosphorothioate
  modified_base 22: mod_base = OTHER; note = 2'-O-methylguanosine-3'-phosphorothioate
  modified_base 23: mod_base = OTHER; note = 2'-O-methylguanosine-3'-phosphate
  misc_feature 1: note = RNA
  misc_feature 2: note = DNA
  misc_feature 3..4: note = RNA
  misc_feature 5: note = DNA
  misc_feature 6: note = RNA
  misc_feature 7: note = DNA
  misc_feature 8..11: note = RNA
  misc_feature 12: note = DNA
  misc_feature 13..23: note = RNA
agcagtctagttgcagtttcagg

SEQ ID NO: 7441 - DNA, 23 bp, synthetic construct
  source 1..23: mol_type = other DNA
  modified_base 1: mod_base = OTHER; note = 2'-O-methyladenosine-3'-phosphorothioate
  modified_base 2: mod_base = OTHER; note = 2'-deoxythimidine-3'-phosphorothioate
  modified_base 3: mod_base = OTHER; note = 2'-O-methylguanosine-3'-phosphate
  modified_base 4: mod_base = OTHER; note = 2'-O-methylcytidine-3'-phosphate
  modified_base 6: mod_base = OTHER; note = 2'-O-methylguanosine-3'-phosphate
  modified_base 8: mod_base = OTHER; note = 2'-O-methylcytidine-3'-phosphate
  modified_base 9: mod_base = OTHER; note = 2'-O-methyluridine-3'-phosphate
  modified_base 10: mod_base = OTHER; note = 2'-O-methyladenosine-3'-phosphate
  modified_base 11: mod_base = OTHER; note = 2'-O-methylguanosine-3'-phosphate
  modified_base 13: mod_base = OTHER; note = 2'-O-methyluridine-3'-phosphate
  modified_base 14: mod_base = OTHER; note = 2'-fluoroguanosine-3'-phosphate
  modified_base 15: mod_base = OTHER; note = 2'-O-methylcytidine-3'-phosphate
  modified_base 16: mod_base = OTHER; note = 2'-O-methyladenosine-3'-phosphate
  modified_base 17: mod_base = OTHER; note = 2'-O-methylguanosine-3'-phosphate
  modified_base 18: mod_base = OTHER; note = 2'-O-methyluridine-3'-phosphate
  modified_base 19: mod_base = OTHER; note = 2'-O-methyluridine-3'-phosphate
  modified_base 20: mod_base = OTHER; note = 2'-O-methyluridine-3'-phosphate
  modified_base 21: mod_base = OTHER; note = 2'-O-methylcytidine-3'-phosphorothioate
  modified_base 22: mod_base = OTHER; note = 2'-O-methyladenosine-3'-phosphorothioate
  modified_base 23: mod_base = OTHER; note = 2'-O-methylguanosine-3'-phosphate
  misc_feature 1: note = RNA
  misc_feature 2: note = DNA
  misc_feature 3..4: note = RNA
  misc_feature 5: note = DNA
  misc_feature 6: note = RNA
  misc_feature 7: note = DNA
  misc_feature 8..11: note = RNA
  misc_feature 12: note = DNA
  misc_feature 13..23: note = RNA
atgcagtctagttgcagtttcag

SEQ ID NO: 7442 - DNA, 23 bp, synthetic construct
  source 1..23: mol_type = other DNA
  modified_base 1: mod_base = OTHER; note = 2'-O-methyladenosine-3'-phosphorothioate
  modified_base 2: mod_base = OTHER; note = 2'-deoxycytidine-3'-phosphorothioate
  modified_base 3: mod_base = OTHER; note = 2'-O-methyluridine-3'-phosphate
  modified_base 4: mod_base = OTHER; note = 2'-O-methylguanosine-3'-phosphate
  modified_base 6: mod_base = OTHER; note = 2'-O-methyladenosine-3'-phosphate
  modified_base 8: mod_base = OTHER; note = 2'-O-methyluridine-3'-phosphate
  modified_base 9: mod_base = OTHER; note = 2'-O-methylcytidine-3'-phosphate
  modified_base 10: mod_base = OTHER; note = 2'-O-methyluridine-3'-phosphate
  modified_base 11: mod_base = OTHER; note = 2'-O-methyladenosine-3'-phosphate
  modified_base 13: mod_base = OTHER; note = 2'-O-methyluridine-3'-phosphate
  modified_base 14: mod_base = OTHER; note = 2'-fluorouridine-3'-phosphate
  modified_base 15: mod_base = OTHER; note = 2'-O-methylguanosine-3'-phosphate
  modified_base 16: mod_base = OTHER; note = 2'-O-methylcytidine-3'-phosphate
  modified_base 17: mod_base = OTHER; note = 2'-O-methyladenosine-3'-phosphate
  modified_base 18: mod_base = OTHER; note = 2'-O-methylguanosine-3'-phosphate
  modified_base 19: mod_base = OTHER; note = 2'-O-methyluridine-3'-phosphate
  modified_base 20: mod_base = OTHER; note = 2'-O-methyluridine-3'-phosphate
  modified_base 21: mod_base = OTHER; note = 2'-O-methyluridine-3'-phosphorothioate
  modified_base 22: mod_base = OTHER; note = 2'-O-methylcytidine-3'-phosphorothioate
  modified_base 23: mod_base = OTHER; note = 2'-O-methyladenosine-3'-phosphate
  misc_feature 1: note = RNA
  misc_feature 2: note = DNA
  misc_feature 3..4: note = RNA
  misc_feature 5: note = DNA
  misc_feature 6: note = RNA
  misc_feature 7: note = DNA
  misc_feature 8..11: note = RNA
  misc_feature 12: note = DNA
  misc_feature 13..23: note = RNA
actgcagtctagttgcagtttca

SEQ ID NO: 7443 - DNA, 23 bp, synthetic construct
  source 1..23: mol_type = other DNA
  modified_base 1: mod_base = OTHER; note = 2'-O-methyladenosine-3'-phosphorothioate
  modified_base 2: mod_base = OTHER; note = 2'-deoxythimidine-3'-phosphorothioate
  modified_base 3: mod_base = OTHER; note = 2'-O-methylcytidine-3'-phosphate
  modified_base 4: mod_base = OTHER; note = 2'-O-methyluridine-3'-phosphate
  modified_base 6: mod_base = OTHER; note = 2'-O-methylcytidine-3'-phosphate
  modified_base 8: mod_base = OTHER; note = 2'-O-methylguanosine-3'-phosphate
  modified_base 9: mod_base = OTHER; note = 2'-O-methyluridine-3'-phosphate
  modified_base 10: mod_base = OTHER; note = 2'-O-methylcytidine-3'-phosphate
  modified_base 11: mod_base = OTHER; note = 2'-O-methyluridine-3'-phosphate
  modified_base 13: mod_base = OTHER; note = 2'-O-methylguanosine-3'-phosphate
  modified_base 14: mod_base = OTHER; note = 2'-fluorouridine-3'-phosphate
  modified_base 15: mod_base = OTHER; note = 2'-O-methyluridine-3'-phosphate
  modified_base 16: mod_base = OTHER; note = 2'-O-methylguanosine-3'-phosphate
  modified_base 17: mod_base = OTHER; note = 2'-O-methylcytidine-3'-phosphate
  modified_base 18: mod_base = OTHER; note = 2'-O-methyladenosine-3'-phosphate
  modified_base 19: mod_base = OTHER; note = 2'-O-methylguanosine-3'-phosphate
  modified_base 20: mod_base = OTHER; note = 2'-O-methyluridine-3'-phosphate
  modified_base 21: mod_base = OTHER; note = 2'-O-methyluridine-3'-phosphorothioate
  modified_base 22: mod_base = OTHER; note = 2'-O-methyluridine-3'-phosphorothioate
  modified_base 23: mod_base = OTHER; note = 2'-O-methylcytidine-3'-phosphate
  misc_feature 1: note = RNA
  misc_feature 2: note = DNA
  misc_feature 3..4: note = RNA
  misc_feature 5: note = DNA
  misc_feature 6: note = RNA
  misc_feature 7: note = DNA
  misc_feature 8..11: note = RNA
  misc_feature 12: note = DNA
  misc_feature 13..23: note = RNA
atctgcagtctagttgcagtttc

SEQ ID NO: 7444 - DNA, 23 bp, synthetic construct
  source 1..23: mol_type = other DNA
  modified_base 1: mod_base = OTHER; note = 2'-O-methyladenosine-3'-phosphorothioate
  modified_base 2: mod_base = OTHER; note = 2'-deoxyguanosine-3'-phosphorothioate
  modified_base 3: mod_base = OTHER; note = 2'-O-methylguanosine-3'-phosphate
  modified_base 4: mod_base = OTHER; note = 2'-O-methyluridine-3'-phosphate
  modified_base 6: mod_base = OTHER; note = 2'-O-methyluridine-3'-phosphate
  modified_base 8: mod_base = OTHER; note = 2'-O-methylcytidine-3'-phosphate
  modified_base 9: mod_base = OTHER; note = 2'-O-methyladenosine-3'-phosphate
  modified_base 10: mod_base = OTHER; note = 2'-O-methylguanosine-3'-phosphate
  modified_base 11: mod_base = OTHER; note = 2'-O-methyluridine-3'-phosphate
  modified_base 13: mod_base = OTHER; note = 2'-O-methyluridine-3'-phosphate
  modified_base 14: mod_base = OTHER; note = 2'-fluoroadenosine-3'-phosphate
  modified_base 15: mod_base = OTHER; note = 2'-O-methylguanosine-3'-phosphate
  modified_base 16: mod_base = OTHER; note = 2'-O-methyluridine-3'-phosphate
  modified_base 17: mod_base = OTHER; note = 2'-O-methyluridine-3'-phosphate
  modified_base 18: mod_base = OTHER; note = 2'-O-methylguanosine-3'-phosphate
  modified_base 19: mod_base = OTHER; note = 2'-O-methylcytidine-3'-phosphate
  modified_base 20: mod_base = OTHER; note = 2'-O-methyladenosine-3'-phosphate
  modified_base 21: mod_base = OTHER; note = 2'-O-methylguanosine-3'-phosphorothioate
  modified_base 22: mod_base = OTHER; note = 2'-O-methyluridine-3'-phosphorothioate
  modified_base 23: mod_base = OTHER; note = 2'-O-methyluridine-3'-phosphate
  misc_feature 1: note = RNA
  misc_feature 2: note = DNA
  misc_feature 3..4: note = RNA
  misc_feature 5: note = DNA
  misc_feature 6: note = RNA
  misc_feature 7: note = DNA
  misc_feature 8..11: note = RNA
  misc_feature 12: note = DNA
  misc_feature 13..23: note = RNA
aggtctgcagtctagttgcagtt

SEQ ID NO: 7445 - DNA, 23 bp, synthetic construct
  source 1..23: mol_type = other DNA
  modified_base 1: mod_base = OTHER; note = 2'-O-methyladenosine-3'-phosphorothioate
  modified_base 2: mod_base = OTHER; note = 2'-deoxycytidine-3'-phosphorothioate
  modified_base 3: mod_base = OTHER; note = 2'-O-methylcytidine-3'-phosphate
  modified_base 4: mod_base = OTHER; note = 2'-O-methyladenosine-3'-phosphate
  modified_base 6: mod_base = OTHER; note = 2'-O-methyluridine-3'-phosphate
  modified_base 8: mod_base = OTHER; note = 2'-O-methyladenosine-3'-phosphate
  modified_base 9: mod_base = OTHER; note = 2'-O-methylcytidine-3'-phosphate
  modified_base 10: mod_base = OTHER; note = 2'-O-methyluridine-3'-phosphate
  modified_base 11: mod_base = OTHER; note = 2'-O-methylguanosine-3'-phosphate
  modified_base 13: mod_base = OTHER; note = 2'-O-methylguanosine-3'-phosphate
  modified_base 14: mod_base = OTHER; note = 2'-fluorocytidine-3'-phosphate
  modified_base 15: mod_base = OTHER; note = 2'-O-methyluridine-3'-phosphate
  modified_base 16: mod_base = OTHER; note = 2'-O-methylguanosine-3'-phosphate
  modified_base 17: mod_base = OTHER; note = 2'-O-methyluridine-3'-phosphate
  modified_base 18: mod_base = OTHER; note = 2'-O-methyluridine-3'-phosphate
  modified_base 19: mod_base = OTHER; note = 2'-O-methylguanosine-3'-phosphate
  modified_base 20: mod_base = OTHER; note = 2'-O-methylcytidine-3'-phosphate
  modified_base 21: mod_base = OTHER; note = 2'-O-methylcytidine-3'-phosphorothioate
  modified_base 22: mod_base = OTHER; note = 2'-O-methyluridine-3'-phosphorothioate
  modified_base 23: mod_base = OTHER; note = 2'-O-methyluridine-3'-phosphate
  misc_feature 1: note = RNA
  misc_feature 2: note = DNA
  misc_feature 3..4: note = RNA
  misc_feature 5: note = DNA
  misc_feature 6: note = RNA
  misc_feature 7: note = DNA
  misc_feature 8..11: note = RNA
  misc_feature 12: note = DNA
  misc_feature 13..23: note = RNA
accagtaactgtgctgttgcctt

SEQ ID NO: 7446 - DNA, 23 bp, synthetic construct
  source 1..23: mol_type = other DNA
  modified_base 1: mod_base = OTHER; note = 2'-O-methyladenosine-3'-phosphorothioate
  modified_base 2: mod_base = OTHER; note = 2'-deoxythimidine-3'-phosphorothioate
  modified_base 3: mod_base = OTHER; note = 2'-O-methylcytidine-3'-phosphate
  modified_base 4: mod_base = OTHER; note = 2'-O-methylcytidine-3'-phosphate
  modified_base 6: mod_base = OTHER; note = 2'-O-methylguanosine-3'-phosphate
  modified_base 8: mod_base = OTHER; note = 2'-O-methyladenosine-3'-phosphate
  modified_base 9: mod_base = OTHER; note = 2'-O-methyladenosine-3'-phosphate
  modified_base 10: mod_base = OTHER; note = 2'-O-methylcytidine-3'-phosphate
  modified_base 11: mod_base = OTHER; note = 2'-O-methyluridine-3'-phosphate
  modified_base 13: mod_base = OTHER; note = 2'-O-methyluridine-3'-phosphate
  modified_base 14: mod_base = OTHER; note = 2'-fluoroguanosine-3'-phosphate
  modified_base 15: mod_base = OTHER; note = 2'-O-methylcytidine-3'-phosphate
  modified_base 16: mod_base = OTHER; note = 2'-O-methyluridine-3'-phosphate
  modified_base 17: mod_base = OTHER; note = 2'-O-methylguanosine-3'-phosphate
  modified_base 18: mod_base = OTHER; note = 2'-O-methyluridine-3'-phosphate
  modified_base 19: mod_base = OTHER; note = 2'-O-methyluridine-3'-phosphate
  modified_base 20: mod_base = OTHER; note = 2'-O-methylguanosine-3'-phosphate
  modified_base 21: mod_base = OTHER; note = 2'-O-methylcytidine-3'-phosphorothioate
  modified_base 22: mod_base = OTHER; note = 2'-O-methylcytidine-3'-phosphorothioate
  modified_base 23: mod_base = OTHER; note = 2'-O-methyluridine-3'-phosphate
  misc_feature 1: note = RNA
  misc_feature 2: note = DNA
  misc_feature 3..4: note = RNA
  misc_feature 5: note = DNA
  misc_feature 6: note = RNA
  misc_feature 7: note = DNA
  misc_feature 8..11: note = RNA
  misc_feature 12: note = DNA
  misc_feature 13..23: note = RNA
atccagtaactgtgctgttgcct

SEQ ID NO: 7447 - DNA, 23 bp, synthetic construct
  source 1..23: mol_type = other DNA
  modified_base 1: mod_base = OTHER; note = 2'-O-methyladenosine-3'-phosphorothioate
  modified_base 2: mod_base = OTHER; note = 2'-deoxyguanosine-3'-phosphorothioate
  modified_base 3: mod_base = OTHER; note = 2'-O-methyluridine-3'-phosphate
  modified_base 4: mod_base = OTHER; note = 2'-O-methylcytidine-3'-phosphate
  modified_base 6: mod_base = OTHER; note = 2'-O-methyladenosine-3'-phosphate
  modified_base 8: mod_base = OTHER; note = 2'-O-methyluridine-3'-phosphate
  modified_base 9: mod_base = OTHER; note = 2'-O-methyladenosine-3'-phosphate
  modified_base 10: mod_base = OTHER; note = 2'-O-methyladenosine-3'-phosphate
  modified_base 11: mod_base = OTHER; note = 2'-O-methylcytidine-3'-phosphate
  modified_base 13: mod_base = OTHER; note = 2'-O-methylguanosine-3'-phosphate
  modified_base 14: mod_base = OTHER; note = 2'-fluorouridine-3'-phosphate
  modified_base 15: mod_base = OTHER; note = 2'-O-methylguanosine-3'-phosphate
  modified_base 16: mod_base = OTHER; note = 2'-O-methylcytidine-3'-phosphate
  modified_base 17: mod_base = OTHER; note = 2'-O-methyluridine-3'-phosphate
  modified_base 18: mod_base = OTHER; note = 2'-O-methylguanosine-3'-phosphate
  modified_base 19: mod_base = OTHER; note = 2'-O-methyluridine-3'-phosphate
  modified_base 20: mod_base = OTHER; note = 2'-O-methyluridine-3'-phosphate
  modified_base 21: mod_base = OTHER; note = 2'-O-methylguanosine-3'-phosphorothioate
  modified_base 22: mod_base = OTHER; note = 2'-O-methylcytidine-3'-phosphorothioate
  modified_base 23: mod_base = OTHER; note = 2'-O-methylcytidine-3'-phosphate
  misc_feature 1: note = RNA
  misc_feature 2: note = DNA
  misc_feature 3..4: note = RNA
  misc_feature 5: note = DNA
  misc_feature 6: note = RNA
  misc_feature 7: note = DNA
  misc_feature 8..11: note = RNA
  misc_feature 12: note = DNA
  misc_feature 13..23: note = RNA
agtccagtaactgtgctgttgcc

SEQ ID NO: 7448 - DNA, 23 bp, synthetic construct
  source 1..23: mol_type = other DNA
  modified_base 1: mod_base = OTHER; note = 2'-O-methyladenosine-3'-phosphorothioate
  modified_base 2: mod_base = OTHER; note = 2'-deoxythimidine-3'-phosphorothioate
  modified_base 3: mod_base = OTHER; note = 2'-O-methylguanosine-3'-phosphate
  modified_base 4: mod_base = OTHER; note = 2'-O-methyluridine-3'-phosphate
  modified_base 6: mod_base = OTHER; note = 2'-O-methylcytidine-3'-phosphate
  modified_base 8: mod_base = OTHER; note = 2'-O-methylguanosine-3'-phosphate
  modified_base 9: mod_base = OTHER; note = 2'-O-methyluridine-3'-phosphate
  modified_base 10: mod_base = OTHER; note = 2'-O-methyladenosine-3'-phosphate
  modified_base 11: mod_base = OTHER; note = 2'-O-methyladenosine-3'-phosphate
  modified_base 13: mod_base = OTHER; note = 2'-O-methyluridine-3'-phosphate
  modified_base 14: mod_base = OTHER; note = 2'-fluoroguanosine-3'-phosphate
  modified_base 15: mod_base = OTHER; note = 2'-O-methyluridine-3'-phosphate
  modified_base 16: mod_base = OTHER; note = 2'-O-methylguanosine-3'-phosphate
  modified_base 17: mod_base = OTHER; note = 2'-O-methylcytidine-3'-phosphate
  modified_base 18: mod_base = OTHER; note = 2'-O-methyluridine-3'-phosphate
  modified_base 19: mod_base = OTHER; note = 2'-O-methylguanosine-3'-phosphate
  modified_base 20: mod_base = OTHER; note = 2'-O-methyluridine-3'-phosphate
  modified_base 21: mod_base = OTHER; note = 2'-O-methyluridine-3'-phosphorothioate
  modified_base 22: mod_base = OTHER; note = 2'-O-methylguanosine-3'-phosphorothioate
  modified_base 23: mod_base = OTHER; note = 2'-O-methylcytidine-3'-phosphate
  misc_feature 1: note = RNA
  misc_feature 2: note = DNA
  misc_feature 3..4: note = RNA
  misc_feature 5: note = DNA
  misc_feature 6: note = RNA
  misc_feature 7: note = DNA
  misc_feature 8..11: note = RNA
  misc_feature 12: note = DNA
  misc_feature 13..23: note = RNA
atgtccagtaactgtgctgttgc

SEQ ID NO: 7449 - DNA, 23 bp, synthetic construct
  source 1..23: mol_type = other DNA
  modified_base 1: mod_base = OTHER; note = 2'-O-methyladenosine-3'-phosphorothioate
  modified_base 2: mod_base = OTHER; note = 2'-deoxythimidine-3'-phosphorothioate
  modified_base 3: mod_base = OTHER; note = 2'-O-methyluridine-3'-phosphate
  modified_base 4: mod_base = OTHER; note = 2'-O-methylguanosine-3'-phosphate
  modified_base 6: mod_base = OTHER; note = 2'-O-methylcytidine-3'-phosphate
  modified_base 8: mod_base = OTHER; note = 2'-O-methyladenosine-3'-phosphate
  modified_base 9: mod_base = OTHER; note = 2'-O-methylguanosine-3'-phosphate
  modified_base 10: mod_base = OTHER; note = 2'-O-methyluridine-3'-phosphate
  modified_base 11: mod_base = OTHER; note = 2'-O-methyladenosine-3'-phosphate
  modified_base 13: mod_base = OTHER; note = 2'-O-methylcytidine-3'-phosphate
  modified_base 14: mod_base = OTHER; note = 2'-fluorouridine-3'-phosphate
  modified_base 15: mod_base = OTHER; note = 2'-O-methylguanosine-3'-phosphate
  modified_base 16: mod_base = OTHER; note = 2'-O-methyluridine-3'-phosphate
  modified_base 17: mod_base = OTHER; note = 2'-O-methylguanosine-3'-phosphate
  modified_base 18: mod_base = OTHER; note = 2'-O-methylcytidine-3'-phosphate
  modified_base 19: mod_base = OTHER; note = 2'-O-methyluridine-3'-phosphate
  modified_base 20: mod_base = OTHER; note = 2'-O-methylguanosine-3'-phosphate
  modified_base 21: mod_base = OTHER; note = 2'-O-methyluridine-3'-phosphorothioate
  modified_base 22: mod_base = OTHER; note = 2'-O-methyluridine-3'-phosphorothioate
  modified_base 23: mod_base = OTHER; note = 2'-O-methylguanosine-3'-phosphate
  misc_feature 1: note = RNA
  misc_feature 2: note = DNA
  misc_feature 3..4: note = RNA
  misc_feature 5: note = DNA
  misc_feature 6: note = RNA
  misc_feature 7: note = DNA
  misc_feature 8..11: note = RNA
  misc_feature 12: note = DNA
  misc_feature 13..23: note = RNA
attgtccagtaactgtgctgttg

SEQ ID NO: 7450 - DNA, 23 bp, synthetic construct
  source 1..23: mol_type = other DNA
  modified_base 1: mod_base = OTHER; note = 2'-O-methyladenosine-3'-phosphorothioate
  modified_base 2: mod_base = OTHER; note = 2'-deoxyguanosine-3'-phosphorothioate
  modified_base 3: mod_base = OTHER; note = 2'-O-methyluridine-3'-phosphate
  modified_base 4: mod_base = OTHER; note = 2'-O-methyluridine-3'-phosphate
  modified_base 6: mod_base = OTHER; note = 2'-O-methyluridine-3'-phosphate
  modified_base 8: mod_base = OTHER; note = 2'-O-methylcytidine-3'-phosphate
  modified_base 9: mod_base = OTHER; note = 2'-O-methyladenosine-3'-phosphate
  modified_base 10: mod_base = OTHER; note = 2'-O-methylguanosine-3'-phosphate
  modified_base 11: mod_base = OTHER; note = 2'-O-methyluridine-3'-phosphate
  modified_base 13: mod_base = OTHER; note = 2'-O-methyladenosine-3'-phosphate
  modified_base 14: mod_base = OTHER; note = 2'-fluorocytidine-3'-phosphate
  modified_base 15: mod_base = OTHER; note = 2'-O-methyluridine-3'-phosphate
  modified_base 16: mod_base = OTHER; note = 2'-O-methylguanosine-3'-phosphate
  modified_base 17: mod_base = OTHER; note = 2'-O-methyluridine-3'-phosphate
  modified_base 18: mod_base = OTHER; note = 2'-O-methylguanosine-3'-phosphate
  modified_base 19: mod_base = OTHER; note = 2'-O-methylcytidine-3'-phosphate
  modified_base 20: mod_base = OTHER; note = 2'-O-methyluridine-3'-phosphate
  modified_base 21: mod_base = OTHER; note = 2'-O-methylguanosine-3'-phosphorothioate
  modified_base 22: mod_base = OTHER; note = 2'-O-methyluridine-3'-phosphorothioate
  modified_base 23: mod_base = OTHER; note = 2'-O-methyluridine-3'-phosphate
  misc_feature 1: note = RNA
  misc_feature 2: note = DNA
  misc_feature 3..4: note = RNA
  misc_feature 5: note = DNA
  misc_feature 6: note = RNA
  misc_feature 7: note = DNA
  misc_feature 8..11: note = RNA
  misc_feature 12: note = DNA
  misc_feature 13..23: note = RNA
agttgtccagtaactgtgctgtt

SEQ ID NO: 7451 - DNA, 23 bp, synthetic construct
  source 1..23: mol_type = other DNA
  modified_base 1: mod_base = OTHER; note = 2'-O-methyladenosine-3'-phosphorothioate
  modified_base 2: mod_base = OTHER; note = 2'-deoxyguanosine-3'-phosphorothioate
  modified_base 3: mod_base = OTHER; note = 2'-O-methylguanosine-3'-phosphate
  modified_base 4: mod_base = OTHER; note = 2'-O-methyluridine-3'-phosphate
  modified_base 6: mod_base = OTHER; note = 2'-O-methylguanosine-3'-phosphate
  modified_base 8: mod_base = OTHER; note = 2'-O-methylcytidine-3'-phosphate
  modified_base 9: mod_base = OTHER; note = 2'-O-methylcytidine-3'-phosphate
  modified_base 10: mod_base = OTHER; note = 2'-O-methyladenosine-3'-phosphate
  modified_base 11: mod_base = OTHER; note = 2'-O-methylguanosine-3'-phosphate
  modified_base 13: mod_base = OTHER; note = 2'-O-methyladenosine-3'-phosphate
  modified_base 14: mod_base = OTHER; note = 2'-fluoroadenosine-3'-phosphate
  modified_base 15: mod_base = OTHER; note = 2'-O-methylcytidine-3'-phosphate
  modified_base 16: mod_base = OTHER; note = 2'-O-methyluridine-3'-phosphate
  modified_base 17: mod_base = OTHER; note = 2'-O-methylguanosine-3'-phosphate
  modified_base 18: mod_base = OTHER; note = 2'-O-methyluridine-3'-phosphate
  modified_base 19: mod_base = OTHER; note = 2'-O-methylguanosine-3'-phosphate
  modified_base 20: mod_base = OTHER; note = 2'-O-methylcytidine-3'-phosphate
  modified_base 21: mod_base = OTHER; note = 2'-O-methyluridine-3'-phosphorothioate
  modified_base 22: mod_base = OTHER; note = 2'-O-methylguanosine-3'-phosphorothioate
  modified_base 23: mod_base = OTHER; note = 2'-O-methyluridine-3'-phosphate
  misc_feature 1: note = RNA
  misc_feature 2: note = DNA
  misc_feature 3..4: note = RNA
  misc_feature 5: note = DNA
  misc_feature 6: note = RNA
  misc_feature 7: note = DNA
  misc_feature 8..11: note = RNA
  misc_feature 12: note = DNA
  misc_feature 13..23: note = RNA
aggttgtccagtaactgtgctgt

SEQ ID NO: 7452 - DNA, 23 bp, synthetic construct
  source 1..23: mol_type = other DNA
  modified_base 1: mod_base = OTHER; note = 2'-O-methyladenosine-3'-phosphorothioate
  modified_base 2: mod_base = OTHER; note = 2'-deoxyguanosine-3'-phosphorothioate
  modified_base 3: mod_base = OTHER; note = 2'-O-methylguanosine-3'-phosphate
  modified_base 4: mod_base = OTHER; note = 2'-O-methyluridine-3'-phosphate
  modified_base 6: mod_base = OTHER; note = 2'-O-methyluridine-3'-phosphate
  modified_base 8: mod_base = OTHER; note = 2'-O-methylcytidine-3'-phosphate
  modified_base 9: mod_base = OTHER; note = 2'-O-methyluridine-3'-phosphate
  modified_base 10: mod_base = OTHER; note = 2'-O-methylguanosine-3'-phosphate
  modified_base 11: mod_base = OTHER; note = 2'-O-methylcytidine-3'-phosphate
  modified_base 13: mod_base = OTHER; note = 2'-O-methylguanosine-3'-phosphate
  modified_base 14: mod_base = OTHER; note = 2'-fluorouridine-3'-phosphate
  modified_base 15: mod_base = OTHER; note = 2'-O-methylguanosine-3'-phosphate
  modified_base 16: mod_base = OTHER; note = 2'-O-methyluridine-3'-phosphate
  modified_base 17: mod_base = OTHER; note = 2'-O-methylcytidine-3'-phosphate
  modified_base 18: mod_base = OTHER; note = 2'-O-methylcytidine-3'-phosphate
  modified_base 19: mod_base = OTHER; note = 2'-O-methyladenosine-3'-phosphate
  modified_base 20: mod_base = OTHER; note = 2'-O-methyladenosine-3'-phosphate
  modified_base 21: mod_base = OTHER; note = 2'-O-methylguanosine-3'-phosphorothioate
  modified_base 22: mod_base = OTHER; note = 2'-O-methyladenosine-3'-phosphorothioate
  modified_base 23: mod_base = OTHER; note = 2'-O-methylguanosine-3'-phosphate
  misc_feature 1: note = RNA
  misc_feature 2: note = DNA
  misc_feature 3..4: note = RNA
  misc_feature 5: note = DNA
  misc_feature 6: note = RNA
  misc_feature 7: note = DNA
  misc_feature 8..11: note = RNA
  misc_feature 12: note = DNA
  misc_feature 13..23: note = RNA
aggtgtcctgctgtgtccaagag

SEQ ID NO: 7453 - DNA, 23 bp, synthetic construct
  source 1..23: mol_type = other DNA
  modified_base 1: mod_base = OTHER; note = 2'-O-methyladenosine-3'-phosphorothioate
  modified_base 2: mod_base = OTHER; note = 2'-deoxythimidine-3'-phosphorothioate
  modified_base 3: mod_base = OTHER; note = 2'-O-methylguanosine-3'-phosphate
  modified_base 4: mod_base = OTHER; note = 2'-O-methylguanosine-3'-phosphate
  modified_base 6: mod_base = OTHER; note = 2'-O-methylguanosine-3'-phosphate
  modified_base 8: mod_base = OTHER; note = 2'-O-methylcytidine-3'-phosphate
  modified_base 9: mod_base = OTHER; note = 2'-O-methylcytidine-3'-phosphate
  modified_base 10: mod_base = OTHER; note = 2'-O-methyluridine-3'-phosphate
  modified_base 11: mod_base = OTHER; note = 2'-O-methylguanosine-3'-phosphate
  modified_base 13: mod_base = OTHER; note = 2'-O-methyluridine-3'-phosphate
  modified_base 14: mod_base = OTHER; note = 2'-fluoroguanosine-3'-phosphate
  modified_base 15: mod_base = OTHER; note = 2'-O-methyluridine-3'-phosphate
  modified_base 16: mod_base = OTHER; note = 2'-O-methylguanosine-3'-phosphate
  modified_base 17: mod_base = OTHER; note = 2'-O-methyluridine-3'-phosphate
  modified_base 18: mod_base = OTHER; note = 2'-O-methylcytidine-3'-phosphate
  modified_base 19: mod_base = OTHER; note = 2'-O-methylcytidine-3'-phosphate
  modified_base 20: mod_base = OTHER; note = 2'-O-methyladenosine-3'-phosphate
  modified_base 21: mod_base = OTHER; note = 2'-O-methyladenosine-3'-phosphorothioate
  modified_base 22: mod_base = OTHER; note = 2'-O-methylguanosine-3'-phosphorothioate
  modified_base 23: mod_base = OTHER; note = 2'-O-methyladenosine-3'-phosphate
  misc_feature 1: note = RNA
  misc_feature 2: note = DNA
  misc_feature 3..4: note = RNA
  misc_feature 5: note = DNA
  misc_feature 6: note = RNA
  misc_feature 7: note = DNA
  misc_feature 8..11: note = RNA
  misc_feature 12: note = DNA
  misc_feature 13..23: note = RNA
atggtgtcctgctgtgtccaaga

SEQ ID NO: 7454 - DNA, 23 bp, synthetic construct
  source 1..23: mol_type = other DNA
  modified_base 1: mod_base = OTHER; note = 2'-O-methyladenosine-3'-phosphorothioate
  modified_base 2: mod_base = OTHER; note = 2'-deoxycytidine-3'-phosphorothioate
  modified_base 3: mod_base = OTHER; note = 2'-O-methyluridine-3'-phosphate
  modified_base 4: mod_base = OTHER; note = 2'-O-methylguanosine-3'-phosphate
  modified_base 6: mod_base = OTHER; note = 2'-O-methyluridine-3'-phosphate
  modified_base 8: mod_base = OTHER; note = 2'-O-methyluridine-3'-phosphate
  modified_base 9: mod_base = OTHER; note = 2'-O-methylcytidine-3'-phosphate
  modified_base 10: mod_base = OTHER; note = 2'-O-methylcytidine-3'-phosphate
  modified_base 11: mod_base = OTHER; note = 2'-O-methyluridine-3'-phosphate
  modified_base 13: mod_base = OTHER; note = 2'-O-methylcytidine-3'-phosphate
  modified_base 14: mod_base = OTHER; note = 2'-fluorouridine-3'-phosphate
  modified_base 15: mod_base = OTHER; note = 2'-O-methylguanosine-3'-phosphate
  modified_base 16: mod_base = OTHER; note = 2'-O-methyluridine-3'-phosphate
  modified_base 17: mod_base = OTHER; note = 2'-O-methylguanosine-3'-phosphate
  modified_base 18: mod_base = OTHER; note = 2'-O-methyluridine-3'-phosphate
  modified_base 19: mod_base = OTHER; note = 2'-O-methylcytidine-3'-phosphate
  modified_base 20: mod_base = OTHER; note = 2'-O-methylcytidine-3'-phosphate
  modified_base 21: mod_base = OTHER; note = 2'-O-methyladenosine-3'-phosphorothioate
  modified_base 22: mod_base = OTHER; note = 2'-O-methyladenosine-3'-phosphorothioate
  modified_base 23: mod_base = OTHER; note = 2'-O-methylguanosine-3'-phosphate
  misc_feature 1: note = RNA
  misc_feature 2: note = DNA
  misc_feature 3..4: note = RNA
  misc_feature 5: note = DNA
  misc_feature 6: note = RNA
  misc_feature 7: note = DNA
  misc_feature 8..11: note = RNA
  misc_feature 12: note = DNA
  misc_feature 13..23: note = RNA
actggtgtcctgctgtgtccaag

SEQ ID NO: 7455 - DNA, 23 bp, synthetic construct
  source 1..23: mol_type = other DNA
  modified_base 1: mod_base = OTHER; note = 2'-O-methyladenosine-3'-phosphorothioate
  modified_base 2: mod_base = OTHER; note = 2'-deoxyguanosine-3'-phosphorothioate
  modified_base 3: mod_base = OTHER; note = 2'-O-methylcytidine-3'-phosphate
  modified_base 4: mod_base = OTHER; note = 2'-O-methyluridine-3'-phosphate
  modified_base 6: mod_base = OTHER; note = 2'-O-methylguanosine-3'-phosphate
  modified_base 8: mod_base = OTHER; note = 2'-O-methylguanosine-3'-phosphate
  modified_base 9: mod_base = OTHER; note = 2'-O-methyluridine-3'-phosphate
  modified_base 10: mod_base = OTHER; note = 2'-O-methylcytidine-3'-phosphate
  modified_base 11: mod_base = OTHER; note = 2'-O-methylcytidine-3'-phosphate
  modified_base 13: mod_base = OTHER; note = 2'-O-methylguanosine-3'-phosphate
  modified_base 14: mod_base = OTHER; note = 2'-fluorocytidine-3'-phosphate
  modified_base 15: mod_base = OTHER; note = 2'-O-methyluridine-3'-phosphate
  modified_base 16: mod_base = OTHER; note = 2'-O-methylguanosine-3'-phosphate
  modified_base 17: mod_base = OTHER; note = 2'-O-methyluridine-3'-phosphate
  modified_base 18: mod_base = OTHER; note = 2'-O-methylguanosine-3'-phosphate
  modified_base 19: mod_base = OTHER; note = 2'-O-methyluridine-3'-phosphate
  modified_base 20: mod_base = OTHER; note = 2'-O-methylcytidine-3'-phosphate
  modified_base 21: mod_base = OTHER; note = 2'-O-methylcytidine-3'-phosphorothioate
  modified_base 22: mod_base = OTHER; note = 2'-O-methyladenosine-3'-phosphorothioate
  modified_base 23: mod_base = OTHER; note = 2'-O-methyladenosine-3'-phosphate
  misc_feature 1: note = RNA
  misc_feature 2: note = DNA
  misc_feature 3..4: note = RNA
  misc_feature 5: note = DNA
  misc_feature 6: note = RNA
  misc_feature 7: note = DNA
  misc_feature 8..11: note = RNA
  misc_feature 12: note = DNA
  misc_feature 13..23: note = RNA
agctggtgtcctgctgtgtccaa

SEQ ID NO: 7456 - DNA, 23 bp, synthetic construct
  source 1..23: mol_type = other DNA
  modified_base 1: mod_base = OTHER; note = 2'-O-methyladenosine-3'-phosphorothioate
  modified_base 2: mod_base = OTHER; note = 2'-deoxythimidine-3'-phosphorothioate
  modified_base 3: mod_base = OTHER; note = 2'-O-methylguanosine-3'-phosphate
  modified_base 4: mod_base = OTHER; note = 2'-O-methylcytidine-3'-phosphate
  modified_base 6: mod_base = OTHER; note = 2'-O-methylguanosine-3'-phosphate
  modified_base 8: mod_base = OTHER; note = 2'-O-methyluridine-3'-phosphate
  modified_base 9: mod_base = OTHER; note = 2'-O-methylguanosine-3'-phosphate
  modified_base 10: mod_base = OTHER; note = 2'-O-methyluridine-3'-phosphate
  modified_base 11: mod_base = OTHER; note = 2'-O-methylcytidine-3'-phosphate
  modified_base 13: mod_base = OTHER; note = 2'-O-methyluridine-3'-phosphate
  modified_base 14: mod_base = OTHER; note = 2'-fluoroguanosine-3'-phosphate
  modified_base 15: mod_base = OTHER; note = 2'-O-methylcytidine-3'-phosphate
  modified_base 16: mod_base = OTHER; note = 2'-O-methyluridine-3'-phosphate
  modified_base 17: mod_base = OTHER; note = 2'-O-methylguanosine-3'-phosphate
  modified_base 18: mod_base = OTHER; note = 2'-O-methyluridine-3'-phosphate
  modified_base 19: mod_base = OTHER; note = 2'-O-methylguanosine-3'-phosphate
  modified_base 20: mod_base = OTHER; note = 2'-O-methyluridine-3'-phosphate
  modified_base 21: mod_base = OTHER; note = 2'-O-methylcytidine-3'-phosphorothioate
  modified_base 22: mod_base = OTHER; note = 2'-O-methylcytidine-3'-phosphorothioate
  modified_base 23: mod_base = OTHER; note = 2'-O-methyladenosine-3'-phosphate
  misc_feature 1: note = RNA
  misc_feature 2: note = DNA
  misc_feature 3..4: note = RNA
  misc_feature 5: note = DNA
  misc_feature 6: note = RNA
  misc_feature 7: note = DNA
  misc_feature 8..11: note = RNA
  misc_feature 12: note = DNA
  misc_feature 13..23: note = RNA
atgctggtgtcctgctgtgtcca

SEQ ID NO: 7457 - DNA, 23 bp, synthetic construct
  source 1..23: mol_type = other DNA
  modified_base 1: mod_base = OTHER; note = 2'-O-methyladenosine-3'-phosphorothioate
  modified_base 2: mod_base = OTHER; note = 2'-deoxycytidine-3'-phosphorothioate
  modified_base 3: mod_base = OTHER; note = 2'-O-methyluridine-3'-phosphate
  modified_base 4: mod_base = OTHER; note = 2'-O-methylguanosine-3'-phosphate
  modified_base 6: mod_base = OTHER; note = 2'-O-methyluridine-3'-phosphate
  modified_base 8: mod_base = OTHER; note = 2'-O-methylguanosine-3'-phosphate
  modified_base 9: mod_base = OTHER; note = 2'-O-methyluridine-3'-phosphate
  modified_base 10: mod_base = OTHER; note = 2'-O-methylguanosine-3'-phosphate
  modified_base 11: mod_base = OTHER; note = 2'-O-methyluridine-3'-phosphate
  modified_base 13: mod_base = OTHER; note = 2'-O-methylcytidine-3'-phosphate
  modified_base 14: mod_base = OTHER; note = 2'-fluorouridine-3'-phosphate
  modified_base 15: mod_base = OTHER; note = 2'-O-methylguanosine-3'-phosphate
  modified_base 16: mod_base = OTHER; note = 2'-O-methylcytidine-3'-phosphate
  modified_base 17: mod_base = OTHER; note = 2'-O-methyluridine-3'-phosphate
  modified_base 18: mod_base = OTHER; note = 2'-O-methylguanosine-3'-phosphate
  modified_base 19: mod_base = OTHER; note = 2'-O-methyluridine-3'-phosphate
  modified_base 20: mod_base = OTHER; note = 2'-O-methylguanosine-3'-phosphate
  modified_base 21: mod_base = OTHER; note = 2'-O-methyluridine-3'-phosphorothioate
  modified_base 22: mod_base = OTHER; note = 2'-O-methylcytidine-3'-phosphorothioate
  modified_base 23: mod_base = OTHER; note = 2'-O-methylcytidine-3'-phosphate
  misc_feature 1: note = RNA
  misc_feature 2: note = DNA
  misc_feature 3..4: note = RNA
  misc_feature 5: note = DNA
  misc_feature 6: note = RNA
  misc_feature 7: note = DNA
  misc_feature 8..11: note = RNA
  misc_feature 12: note = DNA
  misc_feature 13..23: note = RNA
actgctggtgtcctgctgtgtcc

SEQ ID NO: 7458 - DNA, 23 bp, synthetic construct
  source 1..23: mol_type = other DNA
  modified_base 1: mod_base = OTHER; note = 2'-O-methyladenosine-3'-phosphorothioate
  modified_base 2: mod_base = OTHER; note = 2'-deoxyguanosine-3'-phosphorothioate
  modified_base 3: mod_base = OTHER; note = 2'-O-methylcytidine-3'-phosphate
  modified_base 4: mod_base = OTHER; note = 2'-O-methyluridine-3'-phosphate
  modified_base 6: mod_base = OTHER; note = 2'-O-methylcytidine-3'-phosphate
  modified_base 8: mod_base = OTHER; note = 2'-O-methylguanosine-3'-phosphate
  modified_base 9: mod_base = OTHER; note = 2'-O-methylguanosine-3'-phosphate
  modified_base 10: mod_base = OTHER; note = 2'-O-methyluridine-3'-phosphate
  modified_base 11: mod_base = OTHER; note = 2'-O-methylguanosine-3'-phosphate
  modified_base 13: mod_base = OTHER; note = 2'-O-methylcytidine-3'-phosphate
  modified_base 14: mod_base = OTHER; note = 2'-fluorocytidine-3'-phosphate
  modified_base 15: mod_base = OTHER; note = 2'-O-methyluridine-3'-phosphate
  modified_base 16: mod_base = OTHER; note = 2'-O-methylguanosine-3'-phosphate
  modified_base 17: mod_base = OTHER; note = 2'-O-methylcytidine-3'-phosphate
  modified_base 18: mod_base = OTHER; note = 2'-O-methyluridine-3'-phosphate
  modified_base 19: mod_base = OTHER; note = 2'-O-methylguanosine-3'-phosphate
  modified_base 20: mod_base = OTHER; note = 2'-O-methyluridine-3'-phosphate
  modified_base 21: mod_base = OTHER; note = 2'-O-methylguanosine-3'-phosphorothioate
  modified_base 22: mod_base = OTHER; note = 2'-O-methyluridine-3'-phosphorothioate
  modified_base 23: mod_base = OTHER; note = 2'-O-methylcytidine-3'-phosphate
  misc_feature 1: note = RNA
  misc_feature 2: note = DNA
  misc_feature 3..4: note = RNA
  misc_feature 5: note = DNA
  misc_feature 6: note = RNA
  misc_feature 7: note = DNA
  misc_feature 8..11: note = RNA
  misc_feature 12: note = DNA
  misc_feature 13..23: note = RNA
agctgctggtgtcctgctgtgtc

SEQ ID NO: 7459 - DNA, 23 bp, synthetic construct
  source 1..23: mol_type = other DNA
  modified_base 1: mod_base = OTHER; note = 2'-O-methyladenosine-3'-phosphorothioate
  modified_base 2: mod_base = OTHER; note = 2'-deoxyadenosine-3'-phosphorothioate
  modified_base 3: mod_base = OTHER; note = 2'-O-methyladenosine-3'-phosphate
  modified_base 4: mod_base = OTHER; note = 2'-O-methylguanosine-3'-phosphate
  modified_base 6: mod_base = OTHER; note = 2'-O-methylguanosine-3'-phosphate
  modified_base 8: mod_base = OTHER; note = 2'-O-methyluridine-3'-phosphate
  modified_base 9: mod_base = OTHER; note = 2'-O-methylguanosine-3'-phosphate
  modified_base 10: mod_base = OTHER; note = 2'-O-methylcytidine-3'-phosphate
  modified_base 11: mod_base = OTHER; note = 2'-O-methyluridine-3'-phosphate
  modified_base 13: mod_base = OTHER; note = 2'-O-methylguanosine-3'-phosphate
  modified_base 14: mod_base = OTHER; note = 2'-fluorouridine-3'-phosphate
  modified_base 15: mod_base = OTHER; note = 2'-O-methylguanosine-3'-phosphate
  modified_base 16: mod_base = OTHER; note = 2'-O-methyluridine-3'-phosphate
  modified_base 17: mod_base = OTHER; note = 2'-O-methylcytidine-3'-phosphate
  modified_base 18: mod_base = OTHER; note = 2'-O-methylcytidine-3'-phosphate
  modified_base 19: mod_base = OTHER; note = 2'-O-methyluridine-3'-phosphate
  modified_base 20: mod_base = OTHER; note = 2'-O-methylguanosine-3'-phosphate
  modified_base 21: mod_base = OTHER; note = 2'-O-methylcytidine-3'-phosphorothioate
  modified_base 22: mod_base = OTHER; note = 2'-O-methyluridine-3'-phosphorothioate
  modified_base 23: mod_base = OTHER; note = 2'-O-methylguanosine-3'-phosphate
  misc_feature 1: note = RNA
  misc_feature 2: note = DNA
  misc_feature 3..4: note = RNA
  misc_feature 5: note = DNA
  misc_feature 6: note = RNA
  misc_feature 7: note = DNA
  misc_feature 8..11: note = RNA
  misc_feature 12: note = DNA
  misc_feature 13..23: note = RNA
aaagggctgctggtgtcctgctg

SEQ ID NO: 7460 - DNA, 23 bp, synthetic construct
  source 1..23: mol_type = other DNA
  modified_base 1: mod_base = OTHER; note = 2'-O-methyladenosine-3'-phosphorothioate
  modified_base 2: mod_base = OTHER; note = 2'-deoxyadenosine-3'-phosphorothioate
  modified_base 3: mod_base = OTHER; note = 2'-O-methylguanosine-3'-phosphate
  modified_base 4: mod_base = OTHER; note = 2'-O-methylguanosine-3'-phosphate
  modified_base 6: mod_base = OTHER; note = 2'-O-methyladenosine-3'-phosphate
  modified_base 8: mod_base = OTHER; note = 2'-O-methylguanosine-3'-phosphate
  modified_base 9: mod_base = OTHER; note = 2'-O-methylguanosine-3'-phosphate
  modified_base 10: mod_base = OTHER; note = 2'-O-methylcytidine-3'-phosphate
  modified_base 11: mod_base = OTHER; note = 2'-O-methyluridine-3'-phosphate
  modified_base 13: mod_base = OTHER; note = 2'-O-methylcytidine-3'-phosphate
  modified_base 14: mod_base = OTHER; note = 2'-fluorouridine-3'-phosphate
  modified_base 15: mod_base = OTHER; note = 2'-O-methylguanosine-3'-phosphate
  modified_base 16: mod_base = OTHER; note = 2'-O-methylguanosine-3'-phosphate
  modified_base 17: mod_base = OTHER; note = 2'-O-methyluridine-3'-phosphate
  modified_base 18: mod_base = OTHER; note = 2'-O-methylguanosine-3'-phosphate
  modified_base 19: mod_base = OTHER; note = 2'-O-methyluridine-3'-phosphate
  modified_base 20: mod_base = OTHER; note = 2'-O-methylcytidine-3'-phosphate
  modified_base 21: mod_base = OTHER; note = 2'-O-methylcytidine-3'-phosphorothioate
  modified_base 22: mod_base = OTHER; note = 2'-O-methyluridine-3'-phosphorothioate
  modified_base 23: mod_base = OTHER; note = 2'-O-methylguanosine-3'-phosphate
  misc_feature 1: note = RNA
  misc_feature 2: note = DNA
  misc_feature 3..4: note = RNA
  misc_feature 5: note = DNA
  misc_feature 6: note = RNA
  misc_feature 7: note = DNA
  misc_feature 8..11: note = RNA
  misc_feature 12: note = DNA
  misc_feature 13..23: note = RNA
aaggaagggctgctggtgtcctg

SEQ ID NO: 7461 - DNA, 23 bp, synthetic construct
  source 1..23: mol_type = other DNA
  modified_base 1: mod_base = OTHER; note = 2'-O-methyladenosine-3'-phosphorothioate
  modified_base 2: mod_base = OTHER; note = 2'-deoxythimidine-3'-phosphorothioate
  modified_base 3: mod_base = OTHER; note = 2'-O-methyladenosine-3'-phosphate
  modified_base 4: mod_base = OTHER; note = 2'-O-methylguanosine-3'-phosphate
  modified_base 6: mod_base = OTHER; note = 2'-O-methyladenosine-3'-phosphate
  modified_base 8: mod_base = OTHER; note = 2'-O-methylguanosine-3'-phosphate
  modified_base 9: mod_base = OTHER; note = 2'-O-methylguanosine-3'-phosphate
  modified_base 10: mod_base = OTHER; note = 2'-O-methylguanosine-3'-phosphate
  modified_base 11: mod_base = OTHER; note = 2'-O-methylcytidine-3'-phosphate
  modified_base 13: mod_base = OTHER; note = 2'-O-methylguanosine-3'-phosphate
  modified_base 14: mod_base = OTHER; note = 2'-fluorocytidine-3'-phosphate
  modified_base 15: mod_base = OTHER; note = 2'-O-methyluridine-3'-phosphate
  modified_base 16: mod_base = OTHER; note = 2'-O-methylguanosine-3'-phosphate
  modified_base 17: mod_base = OTHER; note = 2'-O-methylguanosine-3'-phosphate
  modified_base 18: mod_base = OTHER; note = 2'-O-methyluridine-3'-phosphate
  modified_base 19: mod_base = OTHER; note = 2'-O-methylguanosine-3'-phosphate
  modified_base 20: mod_base = OTHER; note = 2'-O-methyluridine-3'-phosphate
  modified_base 21: mod_base = OTHER; note = 2'-O-methylcytidine-3'-phosphorothioate
  modified_base 22: mod_base = OTHER; note = 2'-O-methylcytidine-3'-phosphorothioate
  modified_base 23: mod_base = OTHER; note = 2'-O-methyluridine-3'-phosphate
  misc_feature 1: note = RNA
  misc_feature 2: note = DNA
  misc_feature 3..4: note = RNA
  misc_feature 5: note = DNA
  misc_feature 6: note = RNA
  misc_feature 7: note = DNA
  misc_feature 8..11: note = RNA
  misc_feature 12: note = DNA
  misc_feature 13..23: note = RNA
ataggaagggctgctggtgtcct

SEQ ID NO: 7462 - DNA, 23 bp, synthetic construct
  source 1..23: mol_type = other DNA
  modified_base 1: mod_base = OTHER; note = 2'-O-methyladenosine-3'-phosphorothioate
  modified_base 2: mod_base = OTHER; note = 2'-deoxycytidine-3'-phosphorothioate
  modified_base 3: mod_base = OTHER; note = 2'-O-methyluridine-3'-phosphate
  modified_base 4: mod_base = OTHER; note = 2'-O-methyladenosine-3'-phosphate
  modified_base 6: mod_base = OTHER; note = 2'-O-methylguanosine-3'-phosphate
  modified_base 8: mod_base = OTHER; note = 2'-O-methyladenosine-3'-phosphate
  modified_base 9: mod_base = OTHER; note = 2'-O-methylguanosine-3'-phosphate
  modified_base 10: mod_base = OTHER; note = 2'-O-methylguanosine-3'-phosphate
  modified_base 11: mod_base = OTHER; note = 2'-O-methylguanosine-3'-phosphate
  modified_base 13: mod_base = OTHER; note = 2'-O-methyluridine-3'-phosphate
  modified_base 14: mod_base = OTHER; note = 2'-fluoroguanosine-3'-phosphate
  modified_base 15: mod_base = OTHER; note = 2'-O-methylcytidine-3'-phosphate
  modified_base 16: mod_base = OTHER; note = 2'-O-methyluridine-3'-phosphate
  modified_base 17: mod_base = OTHER; note = 2'-O-methylguanosine-3'-phosphate
  modified_base 18: mod_base = OTHER; note = 2'-O-methylguanosine-3'-phosphate
  modified_base 19: mod_base = OTHER; note = 2'-O-methyluridine-3'-phosphate
  modified_base 20: mod_base = OTHER; note = 2'-O-methylguanosine-3'-phosphate
  modified_base 21: mod_base = OTHER; note = 2'-O-methyluridine-3'-phosphorothioate
  modified_base 22: mod_base = OTHER; note = 2'-O-methylcytidine-3'-phosphorothioate
  modified_base 23: mod_base = OTHER; note = 2'-O-methylcytidine-3'-phosphate
  misc_feature 1: note = RNA
  misc_feature 2: note = DNA
  misc_feature 3..4: note = RNA
  misc_feature 5: note = DNA
  misc_feature 6: note = RNA
  misc_feature 7: note = DNA
  misc_feature 8..11: note = RNA
  misc_feature 12: note = DNA
  misc_feature 13..23: note = RNA
actaggaagggctgctggtgtcc

SEQ ID NO: 7463 - DNA, 23 bp, synthetic construct
  source 1..23: mol_type = other DNA
  modified_base 1: mod_base = OTHER; note = 2'-O-methyladenosine-3'-phosphorothioate
  modified_base 2: mod_base = OTHER; note = 2'-deoxycytidine-3'-phosphorothioate
  modified_base 3: mod_base = OTHER; note = 2'-O-methyluridine-3'-phosphate
  modified_base 4: mod_base = OTHER; note = 2'-O-methylcytidine-3'-phosphate
  modified_base 6: mod_base = OTHER; note = 2'-O-methyladenosine-3'-phosphate
  modified_base 8: mod_base = OTHER; note = 2'-O-methylguanosine-3'-phosphate
  modified_base 9: mod_base = OTHER; note = 2'-O-methyladenosine-3'-phosphate
  modified_base 10: mod_base = OTHER; note = 2'-O-methyladenosine-3'-phosphate
  modified_base 11: mod_base = OTHER; note = 2'-O-methylguanosine-3'-phosphate
  modified_base 13: mod_base = OTHER; note = 2'-O-methylguanosine-3'-phosphate
  modified_base 14: mod_base = OTHER; note = 2'-fluorocytidine-3'-phosphate
  modified_base 15: mod_base = OTHER; note = 2'-O-methyluridine-3'-phosphate
  modified_base 16: mod_base = OTHER; note = 2'-O-methylguanosine-3'-phosphate
  modified_base 17: mod_base = OTHER; note = 2'-O-methylcytidine-3'-phosphate
  modified_base 18: mod_base = OTHER; note = 2'-O-methyluridine-3'-phosphate
  modified_base 19: mod_base = OTHER; note = 2'-O-methylguanosine-3'-phosphate
  modified_base 20: mod_base = OTHER; note = 2'-O-methylguanosine-3'-phosphate
  modified_base 21: mod_base = OTHER; note = 2'-O-methyluridine-3'-phosphorothioate
  modified_base 22: mod_base = OTHER; note = 2'-O-methylguanosine-3'-phosphorothioate
  modified_base 23: mod_base = OTHER; note = 2'-O-methyluridine-3'-phosphate
  misc_feature 1: note = RNA
  misc_feature 2: note = DNA
  misc_feature 3..4: note = RNA
  misc_feature 5: note = DNA
  misc_feature 6: note = RNA
  misc_feature 7: note = DNA
  misc_feature 8..11: note = RNA
  misc_feature 12: note = DNA
  misc_feature 13..23: note = RNA
actctaggaagggctgctggtgt

SEQ ID NO: 7464 - DNA, 23 bp, synthetic construct
  source 1..23: mol_type = other DNA
  modified_base 1: mod_base = OTHER; note = 2'-O-methyladenosine-3'-phosphorothioate
  modified_base 2: mod_base = OTHER; note = 2'-deoxyguanosine-3'-phosphorothioate
  modified_base 3: mod_base = OTHER; note = 2'-O-methylcytidine-3'-phosphate
  modified_base 4: mod_base = OTHER; note = 2'-O-methyluridine-3'-phosphate
  modified_base 6: mod_base = OTHER; note = 2'-O-methyluridine-3'-phosphate
  modified_base 8: mod_base = OTHER; note = 2'-O-methylguanosine-3'-phosphate
  modified_base 9: mod_base = OTHER; note = 2'-O-methylguanosine-3'-phosphate
  modified_base 10: mod_base = OTHER; note = 2'-O-methyladenosine-3'-phosphate
  modified_base 11: mod_base = OTHER; note = 2'-O-methyladenosine-3'-phosphate
  modified_base 13: mod_base = OTHER; note = 2'-O-methylguanosine-3'-phosphate
  modified_base 14: mod_base = OTHER; note = 2'-fluoroguanosine-3'-phosphate
  modified_base 15: mod_base = OTHER; note = 2'-O-methylcytidine-3'-phosphate
  modified_base 16: mod_base = OTHER; note = 2'-O-methyluridine-3'-phosphate
  modified_base 17: mod_base = OTHER; note = 2'-O-methylguanosine-3'-phosphate
  modified_base 18: mod_base = OTHER; note = 2'-O-methylcytidine-3'-phosphate
  modified_base 19: mod_base = OTHER; note = 2'-O-methyluridine-3'-phosphate
  modified_base 20: mod_base = OTHER; note = 2'-O-methylguanosine-3'-phosphate
  modified_base 21: mod_base = OTHER; note = 2'-O-methylguanosine-3'-phosphorothioate
  modified_base 22: mod_base = OTHER; note = 2'-O-methyluridine-3'-phosphorothioate
  modified_base 23: mod_base = OTHER; note = 2'-O-methylguanosine-3'-phosphate
  misc_feature 1: note = RNA
  misc_feature 2: note = DNA
  misc_feature 3..4: note = RNA
  misc_feature 5: note = DNA
  misc_feature 6: note = RNA
  misc_feature 7: note = DNA
  misc_feature 8..11: note = RNA
  misc_feature 12: note = DNA
  misc_feature 13..23: note = RNA
agctctaggaagggctgctggtg

SEQ ID NO: 7465 - DNA, 23 bp, synthetic construct
  source 1..23: mol_type = other DNA
  modified_base 1: mod_base = OTHER; note = 2'-O-methyladenosine-3'-phosphorothioate
  modified_base 2: mod_base = OTHER; note = 2'-deoxyadenosine-3'-phosphorothioate
  modified_base 3: mod_base = OTHER; note = 2'-O-methylguanosine-3'-phosphate
  modified_base 4: mod_base = OTHER; note = 2'-O-methylcytidine-3'-phosphate
  modified_base 6: mod_base = OTHER; note = 2'-O-methylcytidine-3'-phosphate
  modified_base 8: mod_base = OTHER; note = 2'-O-methyladenosine-3'-phosphate
  modified_base 9: mod_base = OTHER; note = 2'-O-methylguanosine-3'-phosphate
  modified_base 10: mod_base = OTHER; note = 2'-O-methylguanosine-3'-phosphate
  modified_base 11: mod_base = OTHER; note = 2'-O-methyladenosine-3'-phosphate
  modified_base 13: mod_base = OTHER; note = 2'-O-methylguanosine-3'-phosphate
  modified_base 14: mod_base = OTHER; note = 2'-fluoroguanosine-3'-phosphate
  modified_base 15: mod_base = OTHER; note = 2'-O-methylguanosine-3'-phosphate
  modified_base 16: mod_base = OTHER; note = 2'-O-methylcytidine-3'-phosphate
  modified_base 17: mod_base = OTHER; note = 2'-O-methyluridine-3'-phosphate
  modified_base 18: mod_base = OTHER; note = 2'-O-methylguanosine-3'-phosphate
  modified_base 19: mod_base = OTHER; note = 2'-O-methylcytidine-3'-phosphate
  modified_base 20: mod_base = OTHER; note = 2'-O-methyluridine-3'-phosphate
  modified_base 21: mod_base = OTHER; note = 2'-O-methylguanosine-3'-phosphorothioate
  modified_base 22: mod_base = OTHER; note = 2'-O-methylguanosine-3'-phosphorothioate
  modified_base 23: mod_base = OTHER; note = 2'-O-methyluridine-3'-phosphate
  misc_feature 1: note = RNA
  misc_feature 2: note = DNA
  misc_feature 3..4: note = RNA
  misc_feature 5: note = DNA
  misc_feature 6: note = RNA
  misc_feature 7: note = DNA
  misc_feature 8..11: note = RNA
  misc_feature 12: note = DNA
  misc_feature 13..23: note = RNA
aagctctaggaagggctgctggt

SEQ ID NO: 7466 - DNA, 23 bp, synthetic construct
  source 1..23: mol_type = other DNA
  modified_base 1: mod_base = OTHER; note = 2'-O-methyladenosine-3'-phosphorothioate
  modified_base 2: mod_base = OTHER; note = 2'-deoxythimidine-3'-phosphorothioate
  modified_base 3: mod_base = OTHER; note = 2'-O-methyladenosine-3'-phosphate
  modified_base 4: mod_base = OTHER; note = 2'-O-methyladenosine-3'-phosphate
  modified_base 6: mod_base = OTHER; note = 2'-O-methylcytidine-3'-phosphate
  modified_base 8: mod_base = OTHER; note = 2'-O-methylcytidine-3'-phosphate
  modified_base 9: mod_base = OTHER; note = 2'-O-methyluridine-3'-phosphate
  modified_base 10: mod_base = OTHER; note = 2'-O-methyladenosine-3'-phosphate
  modified_base 11: mod_base = OTHER; note = 2'-O-methylguanosine-3'-phosphate
  modified_base 13: mod_base = OTHER; note = 2'-O-methyladenosine-3'-phosphate
  modified_base 14: mod_base = OTHER; note = 2'-fluoroadenosine-3'-phosphate
  modified_base 15: mod_base = OTHER; note = 2'-O-methylguanosine-3'-phosphate
  modified_base 16: mod_base = OTHER; note = 2'-O-methylguanosine-3'-phosphate
  modified_base 17: mod_base = OTHER; note = 2'-O-methylguanosine-3'-phosphate
  modified_base 18: mod_base = OTHER; note = 2'-O-methylcytidine-3'-phosphate
  modified_base 19: mod_base = OTHER; note = 2'-O-methyluridine-3'-phosphate
  modified_base 20: mod_base = OTHER; note = 2'-O-methylguanosine-3'-phosphate
  modified_base 21: mod_base = OTHER; note = 2'-O-methylcytidine-3'-phosphorothioate
  modified_base 22: mod_base = OTHER; note = 2'-O-methyluridine-3'-phosphorothioate
  modified_base 23: mod_base = OTHER; note = 2'-O-methylguanosine-3'-phosphate
  misc_feature 1: note = RNA
  misc_feature 2: note = DNA
  misc_feature 3..4: note = RNA
  misc_feature 5: note = DNA
  misc_feature 6: note = RNA
  misc_feature 7: note = DNA
  misc_feature 8..11: note = RNA
  misc_feature 12: note = DNA
  misc_feature 13..23: note = RNA
ataagctctaggaagggctgctg

SEQ ID NO: 7467 - DNA, 23 bp, synthetic construct
  source 1..23: mol_type = other DNA
  modified_base 1: mod_base = OTHER; note = 2'-O-methyladenosine-3'-phosphorothioate
  modified_base 2: mod_base = OTHER; note = 2'-deoxythimidine-3'-phosphorothioate
  modified_base 3: mod_base = OTHER; note = 2'-O-methyluridine-3'-phosphate
  modified_base 4: mod_base = OTHER; note = 2'-O-methyladenosine-3'-phosphate
  modified_base 6: mod_base = OTHER; note = 2'-O-methylguanosine-3'-phosphate
  modified_base 8: mod_base = OTHER; note = 2'-O-methyluridine-3'-phosphate
  modified_base 9: mod_base = OTHER; note = 2'-O-methylcytidine-3'-phosphate
  modified_base 10: mod_base = OTHER; note = 2'-O-methyluridine-3'-phosphate
  modified_base 11: mod_base = OTHER; note = 2'-O-methyladenosine-3'-phosphate
  modified_base 13: mod_base = OTHER; note = 2'-O-methylguanosine-3'-phosphate
  modified_base 14: mod_base = OTHER; note = 2'-fluoroadenosine-3'-phosphate
  modified_base 15: mod_base = OTHER; note = 2'-O-methyladenosine-3'-phosphate
  modified_base 16: mod_base = OTHER; note = 2'-O-methylguanosine-3'-phosphate
  modified_base 17: mod_base = OTHER; note = 2'-O-methylguanosine-3'-phosphate
  modified_base 18: mod_base = OTHER; note = 2'-O-methylguanosine-3'-phosphate
  modified_base 19: mod_base = OTHER; note = 2'-O-methylcytidine-3'-phosphate
  modified_base 20: mod_base = OTHER; note = 2'-O-methyluridine-3'-phosphate
  modified_base 21: mod_base = OTHER; note = 2'-O-methylguanosine-3'-phosphorothioate
  modified_base 22: mod_base = OTHER; note = 2'-O-methylcytidine-3'-phosphorothioate
  modified_base 23: mod_base = OTHER; note = 2'-O-methyluridine-3'-phosphate
  misc_feature 1: note = RNA
  misc_feature 2: note = DNA
  misc_feature 3..4: note = RNA
  misc_feature 5: note = DNA
  misc_feature 6: note = RNA
  misc_feature 7: note = DNA
  misc_feature 8..11: note = RNA
  misc_feature 12: note = DNA
  misc_feature 13..23: note = RNA
attaagctctaggaagggctgct

SEQ ID NO: 7468 - DNA, 23 bp, synthetic construct
  source 1..23: mol_type = other DNA
  modified_base 1: mod_base = OTHER; note = 2'-O-methyladenosine-3'-phosphorothioate
  modified_base 2: mod_base = OTHER; note = 2'-deoxycytidine-3'-phosphorothioate
  modified_base 3: mod_base = OTHER; note = 2'-O-methyluridine-3'-phosphate
  modified_base 4: mod_base = OTHER; note = 2'-O-methyluridine-3'-phosphate
  modified_base 6: mod_base = OTHER; note = 2'-O-methyladenosine-3'-phosphate
  modified_base 8: mod_base = OTHER; note = 2'-O-methylcytidine-3'-phosphate
  modified_base 9: mod_base = OTHER; note = 2'-O-methyluridine-3'-phosphate
  modified_base 10: mod_base = OTHER; note = 2'-O-methylcytidine-3'-phosphate
  modified_base 11: mod_base = OTHER; note = 2'-O-methyluridine-3'-phosphate
  modified_base 13: mod_base = OTHER; note = 2'-O-methylguanosine-3'-phosphate
  modified_base 14: mod_base = OTHER; note = 2'-fluoroguanosine-3'-phosphate
  modified_base 15: mod_base = OTHER; note = 2'-O-methyladenosine-3'-phosphate
  modified_base 16: mod_base = OTHER; note = 2'-O-methyladenosine-3'-phosphate
  modified_base 17: mod_base = OTHER; note = 2'-O-methylguanosine-3'-phosphate
  modified_base 18: mod_base = OTHER; note = 2'-O-methylguanosine-3'-phosphate
  modified_base 19: mod_base = OTHER; note = 2'-O-methylguanosine-3'-phosphate
  modified_base 20: mod_base = OTHER; note = 2'-O-methylcytidine-3'-phosphate
  modified_base 21: mod_base = OTHER; note = 2'-O-methyluridine-3'-phosphorothioate
  modified_base 22: mod_base = OTHER; note = 2'-O-methylguanosine-3'-phosphorothioate
  modified_base 23: mod_base = OTHER; note = 2'-O-methylcytidine-3'-phosphate
  misc_feature 1: note = RNA
  misc_feature 2: note = DNA
  misc_feature 3..4: note = RNA
  misc_feature 5: note = DNA
  misc_feature 6: note = RNA
  misc_feature 7: note = DNA
  misc_feature 8..11: note = RNA
  misc_feature 12: note = DNA
  misc_feature 13..23: note = RNA
acttaagctctaggaagggctgc

SEQ ID NO: 7469 - DNA, 23 bp, synthetic construct
  source 1..23: mol_type = other DNA
  modified_base 1: mod_base = OTHER; note = 2'-O-methyladenosine-3'-phosphorothioate
  modified_base 2: mod_base = OTHER; note = 2'-deoxythimidine-3'-phosphorothioate
  modified_base 3: mod_base = OTHER; note = 2'-O-methylcytidine-3'-phosphate
  modified_base 4: mod_base = OTHER; note = 2'-O-methyluridine-3'-phosphate
  modified_base 6: mod_base = OTHER; note = 2'-O-methyladenosine-3'-phosphate
  modified_base 8: mod_base = OTHER; note = 2'-O-methylguanosine-3'-phosphate
  modified_base 9: mod_base = OTHER; note = 2'-O-methylcytidine-3'-phosphate
  modified_base 10: mod_base = OTHER; note = 2'-O-methyluridine-3'-phosphate
  modified_base 11: mod_base = OTHER; note = 2'-O-methylcytidine-3'-phosphate
  modified_base 13: mod_base = OTHER; note = 2'-O-methyladenosine-3'-phosphate
  modified_base 14: mod_base = OTHER; note = 2'-fluoroguanosine-3'-phosphate
  modified_base 15: mod_base = OTHER; note = 2'-O-methylguanosine-3'-phosphate
  modified_base 16: mod_base = OTHER; note = 2'-O-methyladenosine-3'-phosphate
  modified_base 17: mod_base = OTHER; note = 2'-O-methyladenosine-3'-phosphate
  modified_base 18: mod_base = OTHER; note = 2'-O-methylguanosine-3'-phosphate
  modified_base 19: mod_base = OTHER; note = 2'-O-methylguanosine-3'-phosphate
  modified_base 20: mod_base = OTHER; note = 2'-O-methylguanosine-3'-phosphate
  modified_base 21: mod_base = OTHER; note = 2'-O-methylcytidine-3'-phosphorothioate
  modified_base 22: mod_base = OTHER; note = 2'-O-methyluridine-3'-phosphorothioate
  modified_base 23: mod_base = OTHER; note = 2'-O-methylguanosine-3'-phosphate
  misc_feature 1: note = RNA
  misc_feature 2: note = DNA
  misc_feature 3..4: note = RNA
  misc_feature 5: note = DNA
  misc_feature 6: note = RNA
  misc_feature 7: note = DNA
  misc_feature 8..11: note = RNA
  misc_feature 12: note = DNA
  misc_feature 13..23: note = RNA
atcttaagctctaggaagggctg

SEQ ID NO: 7470 - DNA, 23 bp, synthetic construct
  source 1..23: mol_type = other DNA
  modified_base 1: mod_base = OTHER; note = 2'-O-methyladenosine-3'-phosphorothioate
  modified_base 2: mod_base = OTHER; note = 2'-deoxyadenosine-3'-phosphorothioate
  modified_base 3: mod_base = OTHER; note = 2'-O-methyluridine-3'-phosphate
  modified_base 4: mod_base = OTHER; note = 2'-O-methylcytidine-3'-phosphate
  modified_base 6: mod_base = OTHER; note = 2'-O-methyluridine-3'-phosphate
  modified_base 8: mod_base = OTHER; note = 2'-O-methyladenosine-3'-phosphate
  modified_base 9: mod_base = OTHER; note = 2'-O-methylguanosine-3'-phosphate
  modified_base 10: mod_base = OTHER; note = 2'-O-methylcytidine-3'-phosphate
  modified_base 11: mod_base = OTHER; note = 2'-O-methyluridine-3'-phosphate
  modified_base 13: mod_base = OTHER; note = 2'-O-methyluridine-3'-phosphate
  modified_base 14: mod_base = OTHER; note = 2'-fluoroadenosine-3'-phosphate
  modified_base 15: mod_base = OTHER; note = 2'-O-methylguanosine-3'-phosphate
  modified_base 16: mod_base = OTHER; note = 2'-O-methylguanosine-3'-phosphate
  modified_base 17: mod_base = OTHER; note = 2'-O-methyladenosine-3'-phosphate
  modified_base 18: mod_base = OTHER; note = 2'-O-methyladenosine-3'-phosphate
  modified_base 19: mod_base = OTHER; note = 2'-O-methylguanosine-3'-phosphate
  modified_base 20: mod_base = OTHER; note = 2'-O-methylguanosine-3'-phosphate
  modified_base 21: mod_base = OTHER; note = 2'-O-methylguanosine-3'-phosphorothioate
  modified_base 22: mod_base = OTHER; note = 2'-O-methylcytidine-3'-phosphorothioate
  modified_base 23: mod_base = OTHER; note = 2'-O-methyluridine-3'-phosphate
  misc_feature 1: note = RNA
  misc_feature 2: note = DNA
  misc_feature 3..4: note = RNA
  misc_feature 5: note = DNA
  misc_feature 6: note = RNA
  misc_feature 7: note = DNA
  misc_feature 8..11: note = RNA
  misc_feature 12: note = DNA
  misc_feature 13..23: note = RNA
aatcttaagctctaggaagggct

SEQ ID NO: 7471 - DNA, 23 bp, synthetic construct
  source 1..23: mol_type = other DNA
  modified_base 1: mod_base = OTHER; note = 2'-O-methyladenosine-3'-phosphorothioate
  modified_base 2: mod_base = OTHER; note = 2'-deoxyguanosine-3'-phosphorothioate
  modified_base 3: mod_base = OTHER; note = 2'-O-methyladenosine-3'-phosphate
  modified_base 4: mod_base = OTHER; note = 2'-O-methyluridine-3'-phosphate
  modified_base 6: mod_base = OTHER; note = 2'-O-methyluridine-3'-phosphate
  modified_base 8: mod_base = OTHER; note = 2'-O-methyladenosine-3'-phosphate
  modified_base 9: mod_base = OTHER; note = 2'-O-methyladenosine-3'-phosphate
  modified_base 10: mod_base = OTHER; note = 2'-O-methylguanosine-3'-phosphate
  modified_base 11: mod_base = OTHER; note = 2'-O-methylcytidine-3'-phosphate
  modified_base 13: mod_base = OTHER; note = 2'-O-methylcytidine-3'-phosphate
  modified_base 14: mod_base = OTHER; note = 2'-fluorouridine-3'-phosphate
  modified_base 15: mod_base = OTHER; note = 2'-O-methyladenosine-3'-phosphate
  modified_base 16: mod_base = OTHER; note = 2'-O-methylguanosine-3'-phosphate
  modified_base 17: mod_base = OTHER; note = 2'-O-methylguanosine-3'-phosphate
  modified_base 18: mod_base = OTHER; note = 2'-O-methyladenosine-3'-phosphate
  modified_base 19: mod_base = OTHER; note = 2'-O-methyladenosine-3'-phosphate
  modified_base 20: mod_base = OTHER; note = 2'-O-methylguanosine-3'-phosphate
  modified_base 21: mod_base = OTHER; note = 2'-O-methylguanosine-3'-phosphorothioate
  modified_base 22: mod_base = OTHER; note = 2'-O-methylguanosine-3'-phosphorothioate
  modified_base 23: mod_base = OTHER; note = 2'-O-methylcytidine-3'-phosphate
  misc_feature 1: note = RNA
  misc_feature 2: note = DNA
  misc_feature 3..4: note = RNA
  misc_feature 5: note = DNA
  misc_feature 6: note = RNA
  misc_feature 7: note = DNA
  misc_feature 8..11: note = RNA
  misc_feature 12: note = DNA
  misc_feature 13..23: note = RNA
agatcttaagctctaggaagggc

SEQ ID NO: 7472 - DNA, 23 bp, synthetic construct
  source 1..23: mol_type = other DNA
  modified_base 1: mod_base = OTHER; note = 2'-O-methyladenosine-3'-phosphorothioate
  modified_base 2: mod_base = OTHER; note = 2'-deoxyguanosine-3'-phosphorothioate
  modified_base 3: mod_base = OTHER; note = 2'-O-methyluridine-3'-phosphate
  modified_base 4: mod_base = OTHER; note = 2'-O-methyluridine-3'-phosphate
  modified_base 6: mod_base = OTHER; note = 2'-O-methylcytidine-3'-phosphate
  modified_base 8: mod_base = OTHER; note = 2'-O-methylguanosine-3'-phosphate
  modified_base 9: mod_base = OTHER; note = 2'-O-methylguanosine-3'-phosphate
  modified_base 10: mod_base = OTHER; note = 2'-O-methyladenosine-3'-phosphate
  modified_base 11: mod_base = OTHER; note = 2'-O-methyladenosine-3'-phosphate
  modified_base 13: mod_base = OTHER; note = 2'-O-methyluridine-3'-phosphate
  modified_base 14: mod_base = OTHER; note = 2'-fluorocytidine-3'-phosphate
  modified_base 15: mod_base = OTHER; note = 2'-O-methyluridine-3'-phosphate
  modified_base 16: mod_base = OTHER; note = 2'-O-methyladenosine-3'-phosphate
  modified_base 17: mod_base = OTHER; note = 2'-O-methylcytidine-3'-phosphate
  modified_base 18: mod_base = OTHER; note = 2'-O-methylguanosine-3'-phosphate
  modified_base 19: mod_base = OTHER; note = 2'-O-methyluridine-3'-phosphate
  modified_base 20: mod_base = OTHER; note = 2'-O-methyladenosine-3'-phosphate
  modified_base 21: mod_base = OTHER; note = 2'-O-methyladenosine-3'-phosphorothioate
  modified_base 22: mod_base = OTHER; note = 2'-O-methyluridine-3'-phosphorothioate
  modified_base 23: mod_base = OTHER; note = 2'-O-methylguanosine-3'-phosphate
  misc_feature 1: note = RNA
  misc_feature 2: note = DNA
  misc_feature 3..4: note = RNA
  misc_feature 5: note = DNA
  misc_feature 6: note = RNA
  misc_feature 7: note = DNA
  misc_feature 8..11: note = RNA
  misc_feature 12: note = DNA
  misc_feature 13..23: note = RNA
agttcctggaagtctacgtaatg

SEQ ID NO: 7473 - DNA, 23 bp, synthetic construct
  source 1..23: mol_type = other DNA
  modified_base 1: mod_base = OTHER; note = 2'-O-methyladenosine-3'-phosphorothioate
  modified_base 2: mod_base = OTHER; note = 2'-deoxyadenosine-3'-phosphorothioate
  modified_base 3: mod_base = OTHER; note = 2'-O-methylguanosine-3'-phosphate
  modified_base 4: mod_base = OTHER; note = 2'-O-methyluridine-3'-phosphate
  modified_base 6: mod_base = OTHER; note = 2'-O-methylcytidine-3'-phosphate
  modified_base 8: mod_base = OTHER; note = 2'-O-methyluridine-3'-phosphate
  modified_base 9: mod_base = OTHER; note = 2'-O-methylguanosine-3'-phosphate
  modified_base 10: mod_base = OTHER; note = 2'-O-methylguanosine-3'-phosphate
  modified_base 11: mod_base = OTHER; note = 2'-O-methyladenosine-3'-phosphate
  modified_base 13: mod_base = OTHER; note = 2'-O-methylguanosine-3'-phosphate
  modified_base 14: mod_base = OTHER; note = 2'-fluorouridine-3'-phosphate
  modified_base 15: mod_base = OTHER; note = 2'-O-methylcytidine-3'-phosphate
  modified_base 16: mod_base = OTHER; note = 2'-O-methyluridine-3'-phosphate
  modified_base 17: mod_base = OTHER; note = 2'-O-methyladenosine-3'-phosphate
  modified_base 18: mod_base = OTHER; note = 2'-O-methylcytidine-3'-phosphate
  modified_base 19: mod_base = OTHER; note = 2'-O-methylguanosine-3'-phosphate
  modified_base 20: mod_base = OTHER; note = 2'-O-methyluridine-3'-phosphate
  modified_base 21: mod_base = OTHER; note = 2'-O-methyladenosine-3'-phosphorothioate
  modified_base 22: mod_base = OTHER; note = 2'-O-methyladenosine-3'-phosphorothioate
  modified_base 23: mod_base = OTHER; note = 2'-O-methyluridine-3'-phosphate
  misc_feature 1: note = RNA
  misc_feature 2: note = DNA
  misc_feature 3..4: note = RNA
  misc_feature 5: note = DNA
  misc_feature 6: note = RNA
  misc_feature 7: note = DNA
  misc_feature 8..11: note = RNA
  misc_feature 12: note = DNA
  misc_feature 13..23: note = RNA
aagttcctggaagtctacgtaat

SEQ ID NO: 7474 - DNA, 23 bp, synthetic construct
  source 1..23: mol_type = other DNA
  modified_base 1: mod_base = OTHER; note = 2'-O-methyladenosine-3'-phosphorothioate
  modified_base 2: mod_base = OTHER; note = 2'-deoxycytidine-3'-phosphorothioate
  modified_base 3: mod_base = OTHER; note = 2'-O-methyladenosine-3'-phosphate
  modified_base 4: mod_base = OTHER; note = 2'-O-methylguanosine-3'-phosphate
  modified_base 6: mod_base = OTHER; note = 2'-O-methyluridine-3'-phosphate
  modified_base 8: mod_base = OTHER; note = 2'-O-methylcytidine-3'-phosphate
  modified_base 9: mod_base = OTHER; note = 2'-O-methyluridine-3'-phosphate
  modified_base 10: mod_base = OTHER; note = 2'-O-methylguanosine-3'-phosphate
  modified_base 11: mod_base = OTHER; note = 2'-O-methylguanosine-3'-phosphate
  modified_base 13: mod_base = OTHER; note = 2'-O-methyladenosine-3'-phosphate
  modified_base 14: mod_base = OTHER; note = 2'-fluoroguanosine-3'-phosphate
  modified_base 15: mod_base = OTHER; note = 2'-O-methyluridine-3'-phosphate
  modified_base 16: mod_base = OTHER; note = 2'-O-methylcytidine-3'-phosphate
  modified_base 17: mod_base = OTHER; note = 2'-O-methyluridine-3'-phosphate
  modified_base 18: mod_base = OTHER; note = 2'-O-methyladenosine-3'-phosphate
  modified_base 19: mod_base = OTHER; note = 2'-O-methylcytidine-3'-phosphate
  modified_base 20: mod_base = OTHER; note = 2'-O-methylguanosine-3'-phosphate
  modified_base 21: mod_base = OTHER; note = 2'-O-methyluridine-3'-phosphorothioate
  modified_base 22: mod_base = OTHER; note = 2'-O-methyladenosine-3'-phosphorothioate
  modified_base 23: mod_base = OTHER; note = 2'-O-methyladenosine-3'-phosphate
  misc_feature 1: note = RNA
  misc_feature 2: note = DNA
  misc_feature 3..4: note = RNA
  misc_feature 5: note = DNA
  misc_feature 6: note = RNA
  misc_feature 7: note = DNA
  misc_feature 8..11: note = RNA
  misc_feature 12: note = DNA
  misc_feature 13..23: note = RNA
acagttcctggaagtctacgtaa

SEQ ID NO: 7475 - DNA, 23 bp, synthetic construct
  source 1..23: mol_type = other DNA
  modified_base 1: mod_base = OTHER; note = 2'-O-methyladenosine-3'-phosphorothioate
  modified_base 2: mod_base = OTHER; note = 2'-deoxycytidine-3'-phosphorothioate
  modified_base 3: mod_base = OTHER; note = 2'-O-methylcytidine-3'-phosphate
  modified_base 4: mod_base = OTHER; note = 2'-O-methyladenosine-3'-phosphate
  modified_base 6: mod_base = OTHER; note = 2'-O-methyluridine-3'-phosphate
  modified_base 8: mod_base = OTHER; note = 2'-O-methylcytidine-3'-phosphate
  modified_base 9: mod_base = OTHER; note = 2'-O-methylcytidine-3'-phosphate
  modified_base 10: mod_base = OTHER; note = 2'-O-methyluridine-3'-phosphate
  modified_base 11: mod_base = OTHER; note = 2'-O-methylguanosine-3'-phosphate
  modified_base 13: mod_base = OTHER; note = 2'-O-methyladenosine-3'-phosphate
  modified_base 14: mod_base = OTHER; note = 2'-fluoroadenosine-3'-phosphate
  modified_base 15: mod_base = OTHER; note = 2'-O-methylguanosine-3'-phosphate
  modified_base 16: mod_base = OTHER; note = 2'-O-methyluridine-3'-phosphate
  modified_base 17: mod_base = OTHER; note = 2'-O-methylcytidine-3'-phosphate
  modified_base 18: mod_base = OTHER; note = 2'-O-methyluridine-3'-phosphate
  modified_base 19: mod_base = OTHER; note = 2'-O-methyladenosine-3'-phosphate
  modified_base 20: mod_base = OTHER; note = 2'-O-methylcytidine-3'-phosphate
  modified_base 21: mod_base = OTHER; note = 2'-O-methylguanosine-3'-phosphorothioate
  modified_base 22: mod_base = OTHER; note = 2'-O-methyluridine-3'-phosphorothioate
  modified_base 23: mod_base = OTHER; note = 2'-O-methyladenosine-3'-phosphate
  misc_feature 1: note = RNA
  misc_feature 2: note = DNA
  misc_feature 3..4: note = RNA
  misc_feature 5: note = DNA
  misc_feature 6: note = RNA
  misc_feature 7: note = DNA
  misc_feature 8..11: note = RNA
  misc_feature 12: note = DNA
  misc_feature 13..23: note = RNA
accagttcctggaagtctacgta

SEQ ID NO: 7476 - DNA, 23 bp, synthetic construct
  source 1..23: mol_type = other DNA
  modified_base 1: mod_base = OTHER; note = 2'-O-methyladenosine-3'-phosphorothioate
  modified_base 2: mod_base = OTHER; note = 2'-deoxythimidine-3'-phosphorothioate
  modified_base 3: mod_base = OTHER; note = 2'-O-methylcytidine-3'-phosphate
  modified_base 4: mod_base = OTHER; note = 2'-O-methylcytidine-3'-phosphate
  modified_base 6: mod_base = OTHER; note = 2'-O-methyladenosine-3'-phosphate
  modified_base 8: mod_base = OTHER; note = 2'-O-methyluridine-3'-phosphate
  modified_base 9: mod_base = OTHER; note = 2'-O-methyluridine-3'-phosphate
  modified_base 10: mod_base = OTHER; note = 2'-O-methylcytidine-3'-phosphate
  modified_base 11: mod_base = OTHER; note = 2'-O-methylcytidine-3'-phosphate
  modified_base 13: mod_base = OTHER; note = 2'-O-methylguanosine-3'-phosphate
  modified_base 14: mod_base = OTHER; note = 2'-fluoroguanosine-3'-phosphate
  modified_base 15: mod_base = OTHER; note = 2'-O-methyladenosine-3'-phosphate
  modified_base 16: mod_base = OTHER; note = 2'-O-methyladenosine-3'-phosphate
  modified_base 17: mod_base = OTHER; note = 2'-O-methylguanosine-3'-phosphate
  modified_base 18: mod_base = OTHER; note = 2'-O-methyluridine-3'-phosphate
  modified_base 19: mod_base = OTHER; note = 2'-O-methylcytidine-3'-phosphate
  modified_base 20: mod_base = OTHER; note = 2'-O-methyluridine-3'-phosphate
  modified_base 21: mod_base = OTHER; note = 2'-O-methyladenosine-3'-phosphorothioate
  modified_base 22: mod_base = OTHER; note = 2'-O-methylcytidine-3'-phosphorothioate
  modified_base 23: mod_base = OTHER; note = 2'-O-methylguanosine-3'-phosphate
  misc_feature 1: note = RNA
  misc_feature 2: note = DNA
  misc_feature 3..4: note = RNA
  misc_feature 5: note = DNA
  misc_feature 6: note = RNA
  misc_feature 7: note = DNA
  misc_feature 8..11: note = RNA
  misc_feature 12: note = DNA
  misc_feature 13..23: note = RNA
atcccagttcctggaagtctacg

SEQ ID NO: 7477 - DNA, 23 bp, synthetic construct
  source 1..23: mol_type = other DNA
  modified_base 1: mod_base = OTHER; note = 2'-O-methyladenosine-3'-phosphorothioate
  modified_base 2: mod_base = OTHER; note = 2'-deoxyadenosine-3'-phosphorothioate
  modified_base 3: mod_base = OTHER; note = 2'-O-methyluridine-3'-phosphate
  modified_base 4: mod_base = OTHER; note = 2'-O-methylcytidine-3'-phosphate
  modified_base 6: mod_base = OTHER; note = 2'-O-methylcytidine-3'-phosphate
  modified_base 8: mod_base = OTHER; note = 2'-O-methylguanosine-3'-phosphate
  modified_base 9: mod_base = OTHER; note = 2'-O-methyluridine-3'-phosphate
  modified_base 10: mod_base = OTHER; note = 2'-O-methyluridine-3'-phosphate
  modified_base 11: mod_base = OTHER; note = 2'-O-methylcytidine-3'-phosphate
  modified_base 13: mod_base = OTHER; note = 2'-O-methyluridine-3'-phosphate
  modified_base 14: mod_base = OTHER; note = 2'-fluoroguanosine-3'-phosphate
  modified_base 15: mod_base = OTHER; note = 2'-O-methylguanosine-3'-phosphate
  modified_base 16: mod_base = OTHER; note = 2'-O-methyladenosine-3'-phosphate
  modified_base 17: mod_base = OTHER; note = 2'-O-methyladenosine-3'-phosphate
  modified_base 18: mod_base = OTHER; note = 2'-O-methylguanosine-3'-phosphate
  modified_base 19: mod_base = OTHER; note = 2'-O-methyluridine-3'-phosphate
  modified_base 20: mod_base = OTHER; note = 2'-O-methylcytidine-3'-phosphate
  modified_base 21: mod_base = OTHER; note = 2'-O-methyluridine-3'-phosphorothioate
  modified_base 22: mod_base = OTHER; note = 2'-O-methyladenosine-3'-phosphorothioate
  modified_base 23: mod_base = OTHER; note = 2'-O-methylcytidine-3'-phosphate
  misc_feature 1: note = RNA
  misc_feature 2: note = DNA
  misc_feature 3..4: note = RNA
  misc_feature 5: note = DNA
  misc_feature 6: note = RNA
  misc_feature 7: note = DNA
  misc_feature 8..11: note = RNA
  misc_feature 12: note = DNA
  misc_feature 13..23: note = RNA
aatcccagttcctggaagtctac

SEQ ID NO: 7478 - DNA, 23 bp, synthetic construct
  source 1..23: mol_type = other DNA
  modified_base 1: mod_base = OTHER; note = 2'-O-methyladenosine-3'-phosphorothioate
  modified_base 2: mod_base = OTHER; note = 2'-deoxycytidine-3'-phosphorothioate
  modified_base 3: mod_base = OTHER; note = 2'-O-methyladenosine-3'-phosphate
  modified_base 4: mod_base = OTHER; note = 2'-O-methyluridine-3'-phosphate
  modified_base 6: mod_base = OTHER; note = 2'-O-methylcytidine-3'-phosphate
  modified_base 8: mod_base = OTHER; note = 2'-O-methyladenosine-3'-phosphate
  modified_base 9: mod_base = OTHER; note = 2'-O-methylguanosine-3'-phosphate
  modified_base 10: mod_base = OTHER; note = 2'-O-methyluridine-3'-phosphate
  modified_base 11: mod_base = OTHER; note = 2'-O-methyluridine-3'-phosphate
  modified_base 13: mod_base = OTHER; note = 2'-O-methylcytidine-3'-phosphate
  modified_base 14: mod_base = OTHER; note = 2'-fluorouridine-3'-phosphate
  modified_base 15: mod_base = OTHER; note = 2'-O-methylguanosine-3'-phosphate
  modified_base 16: mod_base = OTHER; note = 2'-O-methylguanosine-3'-phosphate
  modified_base 17: mod_base = OTHER; note = 2'-O-methyladenosine-3'-phosphate
  modified_base 18: mod_base = OTHER; note = 2'-O-methyladenosine-3'-phosphate
  modified_base 19: mod_base = OTHER; note = 2'-O-methylguanosine-3'-phosphate
  modified_base 20: mod_base = OTHER; note = 2'-O-methyluridine-3'-phosphate
  modified_base 21: mod_base = OTHER; note = 2'-O-methylcytidine-3'-phosphorothioate
  modified_base 22: mod_base = OTHER; note = 2'-O-methyluridine-3'-phosphorothioate
  modified_base 23: mod_base = OTHER; note = 2'-O-methyladenosine-3'-phosphate
  misc_feature 1: note = RNA
  misc_feature 2: note = DNA
  misc_feature 3..4: note = RNA
  misc_feature 5: note = DNA
  misc_feature 6: note = RNA
  misc_feature 7: note = DNA
  misc_feature 8..11: note = RNA
  misc_feature 12: note = DNA
  misc_feature 13..23: note = RNA
acatcccagttcctggaagtcta

SEQ ID NO: 7479 - DNA, 23 bp, synthetic construct
  source 1..23: mol_type = other DNA
  modified_base 1: mod_base = OTHER; note = 2'-O-methyladenosine-3'-phosphorothioate
  modified_base 2: mod_base = OTHER; note = 2'-deoxycytidine-3'-phosphorothioate
  modified_base 3: mod_base = OTHER; note = 2'-O-methylcytidine-3'-phosphate
  modified_base 4: mod_base = OTHER; note = 2'-O-methyladenosine-3'-phosphate
  modified_base 6: mod_base = OTHER; note = 2'-O-methylcytidine-3'-phosphate
  modified_base 8: mod_base = OTHER; note = 2'-O-methylcytidine-3'-phosphate
  modified_base 9: mod_base = OTHER; note = 2'-O-methyladenosine-3'-phosphate
  modified_base 10: mod_base = OTHER; note = 2'-O-methylguanosine-3'-phosphate
  modified_base 11: mod_base = OTHER; note = 2'-O-methyluridine-3'-phosphate
  modified_base 13: mod_base = OTHER; note = 2'-O-methylcytidine-3'-phosphate
  modified_base 14: mod_base = OTHER; note = 2'-fluorocytidine-3'-phosphate
  modified_base 15: mod_base = OTHER; note = 2'-O-methyluridine-3'-phosphate
  modified_base 16: mod_base = OTHER; note = 2'-O-methylguanosine-3'-phosphate
  modified_base 17: mod_base = OTHER; note = 2'-O-methylguanosine-3'-phosphate
  modified_base 18: mod_base = OTHER; note = 2'-O-methyladenosine-3'-phosphate
  modified_base 19: mod_base = OTHER; note = 2'-O-methyladenosine-3'-phosphate
  modified_base 20: mod_base = OTHER; note = 2'-O-methylguanosine-3'-phosphate
  modified_base 21: mod_base = OTHER; note = 2'-O-methyluridine-3'-phosphorothioate
  modified_base 22: mod_base = OTHER; note = 2'-O-methylcytidine-3'-phosphorothioate
  modified_base 23: mod_base = OTHER; note = 2'-O-methyluridine-3'-phosphate
  misc_feature 1: note = RNA
  misc_feature 2: note = DNA
  misc_feature 3..4: note = RNA
  misc_feature 5: note = DNA
  misc_feature 6: note = RNA
  misc_feature 7: note = DNA
  misc_feature 8..11: note = RNA
  misc_feature 12: note = DNA
  misc_feature 13..23: note = RNA
accatcccagttcctggaagtct

SEQ ID NO: 7480 - DNA, 23 bp, synthetic construct
  source 1..23: mol_type = other DNA
  modified_base 1: mod_base = OTHER; note = 2'-O-methyladenosine-3'-phosphorothioate
  modified_base 2: mod_base = OTHER; note = 2'-deoxyguanosine-3'-phosphorothioate
  modified_base 3: mod_base = OTHER; note = 2'-O-methylcytidine-3'-phosphate
  modified_base 4: mod_base = OTHER; note = 2'-O-methylcytidine-3'-phosphate
  modified_base 6: mod_base = OTHER; note = 2'-O-methyluridine-3'-phosphate
  modified_base 8: mod_base = OTHER; note = 2'-O-methylcytidine-3'-phosphate
  modified_base 9: mod_base = OTHER; note = 2'-O-methylcytidine-3'-phosphate
  modified_base 10: mod_base = OTHER; note = 2'-O-methyladenosine-3'-phosphate
  modified_base 11: mod_base = OTHER; note = 2'-O-methylguanosine-3'-phosphate
  modified_base 13: mod_base = OTHER; note = 2'-O-methyluridine-3'-phosphate
  modified_base 14: mod_base = OTHER; note = 2'-fluorocytidine-3'-phosphate
  modified_base 15: mod_base = OTHER; note = 2'-O-methylcytidine-3'-phosphate
  modified_base 16: mod_base = OTHER; note = 2'-O-methyluridine-3'-phosphate
  modified_base 17: mod_base = OTHER; note = 2'-O-methylguanosine-3'-phosphate
  modified_base 18: mod_base = OTHER; note = 2'-O-methylguanosine-3'-phosphate
  modified_base 19: mod_base = OTHER; note = 2'-O-methyladenosine-3'-phosphate
  modified_base 20: mod_base = OTHER; note = 2'-O-methyladenosine-3'-phosphate
  modified_base 21: mod_base = OTHER; note = 2'-O-methylguanosine-3'-phosphorothioate
  modified_base 22: mod_base = OTHER; note = 2'-O-methyluridine-3'-phosphorothioate
  modified_base 23: mod_base = OTHER; note = 2'-O-methylcytidine-3'-phosphate
  misc_feature 1: note = RNA
  misc_feature 2: note = DNA
  misc_feature 3..4: note = RNA
  misc_feature 5: note = DNA
  misc_feature 6: note = RNA
  misc_feature 7: note = DNA
  misc_feature 8..11: note = RNA
  misc_feature 12: note = DNA
  misc_feature 13..23: note = RNA
agccatcccagttcctggaagtc

SEQ ID NO: 7481 - DNA, 23 bp, synthetic construct
  source 1..23: mol_type = other DNA
  modified_base 1: mod_base = OTHER; note = 2'-O-methyladenosine-3'-phosphorothioate
  modified_base 2: mod_base = OTHER; note = 2'-deoxythimidine-3'-phosphorothioate
  modified_base 3: mod_base = OTHER; note = 2'-O-methylcytidine-3'-phosphate
  modified_base 4: mod_base = OTHER; note = 2'-O-methylguanosine-3'-phosphate
  modified_base 6: mod_base = OTHER; note = 2'-O-methylguanosine-3'-phosphate
  modified_base 8: mod_base = OTHER; note = 2'-O-methyluridine-3'-phosphate
  modified_base 9: mod_base = OTHER; note = 2'-O-methylguanosine-3'-phosphate
  modified_base 10: mod_base = OTHER; note = 2'-O-methylcytidine-3'-phosphate
  modified_base 11: mod_base = OTHER; note = 2'-O-methyladenosine-3'-phosphate
  modified_base 13: mod_base = OTHER; note = 2'-O-methyluridine-3'-phosphate
  modified_base 14: mod_base = OTHER; note = 2'-fluoroadenosine-3'-phosphate
  modified_base 15: mod_base = OTHER; note = 2'-O-methyluridine-3'-phosphate
  modified_base 16: mod_base = OTHER; note = 2'-O-methylcytidine-3'-phosphate
  modified_base 17: mod_base = OTHER; note = 2'-O-methylcytidine-3'-phosphate
  modified_base 18: mod_base = OTHER; note = 2'-O-methyladenosine-3'-phosphate
  modified_base 19: mod_base = OTHER; note = 2'-O-methylguanosine-3'-phosphate
  modified_base 20: mod_base = OTHER; note = 2'-O-methyluridine-3'-phosphate
  modified_base 21: mod_base = OTHER; note = 2'-O-methylcytidine-3'-phosphorothioate
  modified_base 22: mod_base = OTHER; note = 2'-O-methylcytidine-3'-phosphorothioate
  modified_base 23: mod_base = OTHER; note = 2'-O-methylcytidine-3'-phosphate
  misc_feature 1: note = RNA
  misc_feature 2: note = DNA
  misc_feature 3..4: note = RNA
  misc_feature 5: note = DNA
  misc_feature 6: note = RNA
  misc_feature 7: note = DNA
  misc_feature 8..11: note = RNA
  misc_feature 12: note = DNA
  misc_feature 13..23: note = RNA
atcgggctgcagtatccagtccc

SEQ ID NO: 7482 - DNA, 23 bp, synthetic construct
  source 1..23: mol_type = other DNA
  modified_base 1: mod_base = OTHER; note = 2'-O-methyladenosine-3'-phosphorothioate
  modified_base 2: mod_base = OTHER; note = 2'-deoxycytidine-3'-phosphorothioate
  modified_base 3: mod_base = OTHER; note = 2'-O-methyluridine-3'-phosphate
  modified_base 4: mod_base = OTHER; note = 2'-O-methylcytidine-3'-phosphate
  modified_base 6: mod_base = OTHER; note = 2'-O-methylguanosine-3'-phosphate
  modified_base 8: mod_base = OTHER; note = 2'-O-methylcytidine-3'-phosphate
  modified_base 9: mod_base = OTHER; note = 2'-O-methyluridine-3'-phosphate
  modified_base 10: mod_base = OTHER; note = 2'-O-methylguanosine-3'-phosphate
  modified_base 11: mod_base = OTHER; note = 2'-O-methylcytidine-3'-phosphate
  modified_base 13: mod_base = OTHER; note = 2'-O-methylguanosine-3'-phosphate
  modified_base 14: mod_base = OTHER; note = 2'-fluorouridine-3'-phosphate
  modified_base 15: mod_base = OTHER; note = 2'-O-methyladenosine-3'-phosphate
  modified_base 16: mod_base = OTHER; note = 2'-O-methyluridine-3'-phosphate
  modified_base 17: mod_base = OTHER; note = 2'-O-methylcytidine-3'-phosphate
  modified_base 18: mod_base = OTHER; note = 2'-O-methylcytidine-3'-phosphate
  modified_base 19: mod_base = OTHER; note = 2'-O-methyladenosine-3'-phosphate
  modified_base 20: mod_base = OTHER; note = 2'-O-methylguanosine-3'-phosphate
  modified_base 21: mod_base = OTHER; note = 2'-O-methyluridine-3'-phosphorothioate
  modified_base 22: mod_base = OTHER; note = 2'-O-methylcytidine-3'-phosphorothioate
  modified_base 23: mod_base = OTHER; note = 2'-O-methylcytidine-3'-phosphate
  misc_feature 1: note = RNA
  misc_feature 2: note = DNA
  misc_feature 3..4: note = RNA
  misc_feature 5: note = DNA
  misc_feature 6: note = RNA
  misc_feature 7: note = DNA
  misc_feature 8..11: note = RNA
  misc_feature 12: note = DNA
  misc_feature 13..23: note = RNA
actcgggctgcagtatccagtcc

SEQ ID NO: 7483 - DNA, 23 bp, synthetic construct
  source 1..23: mol_type = other DNA
  modified_base 1: mod_base = OTHER; note = 2'-O-methyladenosine-3'-phosphorothioate
  modified_base 2: mod_base = OTHER; note = 2'-deoxycytidine-3'-phosphorothioate
  modified_base 3: mod_base = OTHER; note = 2'-O-methylcytidine-3'-phosphate
  modified_base 4: mod_base = OTHER; note = 2'-O-methyluridine-3'-phosphate
  modified_base 6: mod_base = OTHER; note = 2'-O-methylguanosine-3'-phosphate
  modified_base 8: mod_base = OTHER; note = 2'-O-methylguanosine-3'-phosphate
  modified_base 9: mod_base = OTHER; note = 2'-O-methylcytidine-3'-phosphate
  modified_base 10: mod_base = OTHER; note = 2'-O-methyluridine-3'-phosphate
  modified_base 11: mod_base = OTHER; note = 2'-O-methylguanosine-3'-phosphate
  modified_base 13: mod_base = OTHER; note = 2'-O-methyladenosine-3'-phosphate
  modified_base 14: mod_base = OTHER; note = 2'-fluoroguanosine-3'-phosphate
  modified_base 15: mod_base = OTHER; note = 2'-O-methyluridine-3'-phosphate
  modified_base 16: mod_base = OTHER; note = 2'-O-methyladenosine-3'-phosphate
  modified_base 17: mod_base = OTHER; note = 2'-O-methyluridine-3'-phosphate
  modified_base 18: mod_base = OTHER; note = 2'-O-methylcytidine-3'-phosphate
  modified_base 19: mod_base = OTHER; note = 2'-O-methylcytidine-3'-phosphate
  modified_base 20: mod_base = OTHER; note = 2'-O-methyladenosine-3'-phosphate
  modified_base 21: mod_base = OTHER; note = 2'-O-methylguanosine-3'-phosphorothioate
  modified_base 22: mod_base = OTHER; note = 2'-O-methyluridine-3'-phosphorothioate
  modified_base 23: mod_base = OTHER; note = 2'-O-methylcytidine-3'-phosphate
  misc_feature 1: note = RNA
  misc_feature 2: note = DNA
  misc_feature 3..4: note = RNA
  misc_feature 5: note = DNA
  misc_feature 6: note = RNA
  misc_feature 7: note = DNA
  misc_feature 8..11: note = RNA
  misc_feature 12: note = DNA
  misc_feature 13..23: note = RNA
acctcgggctgcagtatccagtc

SEQ ID NO: 7484 - DNA, 23 bp, synthetic construct
  source 1..23: mol_type = other DNA
  modified_base 1: mod_base = OTHER; note = 2'-O-methyladenosine-3'-phosphorothioate
  modified_base 2: mod_base = OTHER; note = 2'-deoxythimidine-3'-phosphorothioate
  modified_base 3: mod_base = OTHER; note = 2'-O-methylguanosine-3'-phosphate
  modified_base 4: mod_base = OTHER; note = 2'-O-methylcytidine-3'-phosphate
  modified_base 6: mod_base = OTHER; note = 2'-O-methylguanosine-3'-phosphate
  modified_base 8: mod_base = OTHER; note = 2'-O-methyladenosine-3'-phosphate
  modified_base 9: mod_base = OTHER; note = 2'-O-methyladenosine-3'-phosphate
  modified_base 10: mod_base = OTHER; note = 2'-O-methyluridine-3'-phosphate
  modified_base 11: mod_base = OTHER; note = 2'-O-methyluridine-3'-phosphate
  modified_base 13: mod_base = OTHER; note = 2'-O-methyladenosine-3'-phosphate
  modified_base 14: mod_base = OTHER; note = 2'-fluoroguanosine-3'-phosphate
  modified_base 15: mod_base = OTHER; note = 2'-O-methylcytidine-3'-phosphate
  modified_base 16: mod_base = OTHER; note = 2'-O-methyluridine-3'-phosphate
  modified_base 17: mod_base = OTHER; note = 2'-O-methylguanosine-3'-phosphate
  modified_base 18: mod_base = OTHER; note = 2'-O-methylguanosine-3'-phosphate
  modified_base 19: mod_base = OTHER; note = 2'-O-methyluridine-3'-phosphate
  modified_base 20: mod_base = OTHER; note = 2'-O-methyladenosine-3'-phosphate
  modified_base 21: mod_base = OTHER; note = 2'-O-methylcytidine-3'-phosphorothioate
  modified_base 22: mod_base = OTHER; note = 2'-O-methylcytidine-3'-phosphorothioate
  modified_base 23: mod_base = OTHER; note = 2'-O-methylcytidine-3'-phosphate
  misc_feature 1: note = RNA
  misc_feature 2: note = DNA
  misc_feature 3..4: note = RNA
  misc_feature 5: note = DNA
  misc_feature 6: note = RNA
  misc_feature 7: note = DNA
  misc_feature 8..11: note = RNA
  misc_feature 12: note = DNA
  misc_feature 13..23: note = RNA
atgcagtaattcagctggtaccc

SEQ ID NO: 7485 - DNA, 23 bp, synthetic construct
  source 1..23: mol_type = other DNA
  modified_base 1: mod_base = OTHER; note = 2'-O-methyladenosine-3'-phosphorothioate
  modified_base 2: mod_base = OTHER; note = 2'-deoxycytidine-3'-phosphorothioate
  modified_base 3: mod_base = OTHER; note = 2'-O-methyluridine-3'-phosphate
  modified_base 4: mod_base = OTHER; note = 2'-O-methylguanosine-3'-phosphate
  modified_base 6: mod_base = OTHER; note = 2'-O-methyladenosine-3'-phosphate
  modified_base 8: mod_base = OTHER; note = 2'-O-methyluridine-3'-phosphate
  modified_base 9: mod_base = OTHER; note = 2'-O-methyladenosine-3'-phosphate
  modified_base 10: mod_base = OTHER; note = 2'-O-methyladenosine-3'-phosphate
  modified_base 11: mod_base = OTHER; note = 2'-O-methyluridine-3'-phosphate
  modified_base 13: mod_base = OTHER; note = 2'-O-methylcytidine-3'-phosphate
  modified_base 14: mod_base = OTHER; note = 2'-fluoroadenosine-3'-phosphate
  modified_base 15: mod_base = OTHER; note = 2'-O-methylguanosine-3'-phosphate
  modified_base 16: mod_base = OTHER; note = 2'-O-methylcytidine-3'-phosphate
  modified_base 17: mod_base = OTHER; note = 2'-O-methyluridine-3'-phosphate
  modified_base 18: mod_base = OTHER; note = 2'-O-methylguanosine-3'-phosphate
  modified_base 19: mod_base = OTHER; note = 2'-O-methylguanosine-3'-phosphate
  modified_base 20: mod_base = OTHER; note = 2'-O-methyluridine-3'-phosphate
  modified_base 21: mod_base = OTHER; note = 2'-O-methyladenosine-3'-phosphorothioate
  modified_base 22: mod_base = OTHER; note = 2'-O-methylcytidine-3'-phosphorothioate
  modified_base 23: mod_base = OTHER; note = 2'-O-methylcytidine-3'-phosphate
  misc_feature 1: note = RNA
  misc_feature 2: note = DNA
  misc_feature 3..4: note = RNA
  misc_feature 5: note = DNA
  misc_feature 6: note = RNA
  misc_feature 7: note = DNA
  misc_feature 8..11: note = RNA
  misc_feature 12: note = DNA
  misc_feature 13..23: note = RNA
actgcagtaattcagctggtacc

SEQ ID NO: 7486 - DNA, 23 bp, synthetic construct
  source 1..23: mol_type = other DNA
  modified_base 1: mod_base = OTHER; note = 2'-O-methyladenosine-3'-phosphorothioate
  modified_base 2: mod_base = OTHER; note = 2'-deoxyadenosine-3'-phosphorothioate
  modified_base 3: mod_base = OTHER; note = 2'-O-methylcytidine-3'-phosphate
  modified_base 4: mod_base = OTHER; note = 2'-O-methyluridine-3'-phosphate
  modified_base 6: mod_base = OTHER; note = 2'-O-methylcytidine-3'-phosphate
  modified_base 8: mod_base = OTHER; note = 2'-O-methylguanosine-3'-phosphate
  modified_base 9: mod_base = OTHER; note = 2'-O-methyluridine-3'-phosphate
  modified_base 10: mod_base = OTHER; note = 2'-O-methyladenosine-3'-phosphate
  modified_base 11: mod_base = OTHER; note = 2'-O-methyladenosine-3'-phosphate
  modified_base 13: mod_base = OTHER; note = 2'-O-methyluridine-3'-phosphate
  modified_base 14: mod_base = OTHER; note = 2'-fluorocytidine-3'-phosphate
  modified_base 15: mod_base = OTHER; note = 2'-O-methyladenosine-3'-phosphate
  modified_base 16: mod_base = OTHER; note = 2'-O-methylguanosine-3'-phosphate
  modified_base 17: mod_base = OTHER; note = 2'-O-methylcytidine-3'-phosphate
  modified_base 18: mod_base = OTHER; note = 2'-O-methyluridine-3'-phosphate
  modified_base 19: mod_base = OTHER; note = 2'-O-methylguanosine-3'-phosphate
  modified_base 20: mod_base = OTHER; note = 2'-O-methylguanosine-3'-phosphate
  modified_base 21: mod_base = OTHER; note = 2'-O-methyluridine-3'-phosphorothioate
  modified_base 22: mod_base = OTHER; note = 2'-O-methyladenosine-3'-phosphorothioate
  modified_base 23: mod_base = OTHER; note = 2'-O-methylcytidine-3'-phosphate
  misc_feature 1: note = RNA
  misc_feature 2: note = DNA
  misc_feature 3..4: note = RNA
  misc_feature 5: note = DNA
  misc_feature 6: note = RNA
  misc_feature 7: note = DNA
  misc_feature 8..11: note = RNA
  misc_feature 12: note = DNA
  misc_feature 13..23: note = RNA
aactgcagtaattcagctggtac

SEQ ID NO: 7487 - DNA, 23 bp, synthetic construct
  source 1..23: mol_type = other DNA
  modified_base 1: mod_base = OTHER; note = 2'-O-methyladenosine-3'-phosphorothioate
  modified_base 2: mod_base = OTHER; note = 2'-deoxycytidine-3'-phosphorothioate
  modified_base 3: mod_base = OTHER; note = 2'-O-methyladenosine-3'-phosphate
  modified_base 4: mod_base = OTHER; note = 2'-O-methylcytidine-3'-phosphate
  modified_base 6: mod_base = OTHER; note = 2'-O-methylguanosine-3'-phosphate
  modified_base 8: mod_base = OTHER; note = 2'-O-methyladenosine-3'-phosphate
  modified_base 9: mod_base = OTHER; note = 2'-O-methylguanosine-3'-phosphate
  modified_base 10: mod_base = OTHER; note = 2'-O-methyluridine-3'-phosphate
  modified_base 11: mod_base = OTHER; note = 2'-O-methyladenosine-3'-phosphate
  modified_base 13: mod_base = OTHER; note = 2'-O-methyluridine-3'-phosphate
  modified_base 14: mod_base = OTHER; note = 2'-fluorouridine-3'-phosphate
  modified_base 15: mod_base = OTHER; note = 2'-O-methylcytidine-3'-phosphate
  modified_base 16: mod_base = OTHER; note = 2'-O-methyladenosine-3'-phosphate
  modified_base 17: mod_base = OTHER; note = 2'-O-methylguanosine-3'-phosphate
  modified_base 18: mod_base = OTHER; note = 2'-O-methylcytidine-3'-phosphate
  modified_base 19: mod_base = OTHER; note = 2'-O-methyluridine-3'-phosphate
  modified_base 20: mod_base = OTHER; note = 2'-O-methylguanosine-3'-phosphate
  modified_base 21: mod_base = OTHER; note = 2'-O-methylguanosine-3'-phosphorothioate
  modified_base 22: mod_base = OTHER; note = 2'-O-methyluridine-3'-phosphorothioate
  modified_base 23: mod_base = OTHER; note = 2'-O-methyladenosine-3'-phosphate
  misc_feature 1: note = RNA
  misc_feature 2: note = DNA
  misc_feature 3..4: note = RNA
  misc_feature 5: note = DNA
  misc_feature 6: note = RNA
  misc_feature 7: note = DNA
  misc_feature 8..11: note = RNA
  misc_feature 12: note = DNA
  misc_feature 13..23: note = RNA
acactgcagtaattcagctggta

SEQ ID NO: 7488 - DNA, 23 bp, synthetic construct
  source 1..23: mol_type = other DNA
  modified_base 1: mod_base = OTHER; note = 2'-O-methyladenosine-3'-phosphorothioate
  modified_base 2: mod_base = OTHER; note = 2'-deoxycytidine-3'-phosphorothioate
  modified_base 3: mod_base = OTHER; note = 2'-O-methylcytidine-3'-phosphate
  modified_base 4: mod_base = OTHER; note = 2'-O-methyladenosine-3'-phosphate
  modified_base 6: mod_base = OTHER; note = 2'-O-methyluridine-3'-phosphate
  modified_base 8: mod_base = OTHER; note = 2'-O-methylcytidine-3'-phosphate
  modified_base 9: mod_base = OTHER; note = 2'-O-methyladenosine-3'-phosphate
  modified_base 10: mod_base = OTHER; note = 2'-O-methylguanosine-3'-phosphate
  modified_base 11: mod_base = OTHER; note = 2'-O-methyluridine-3'-phosphate
  modified_base 13: mod_base = OTHER; note = 2'-O-methyladenosine-3'-phosphate
  modified_base 14: mod_base = OTHER; note = 2'-fluorouridine-3'-phosphate
  modified_base 15: mod_base = OTHER; note = 2'-O-methyluridine-3'-phosphate
  modified_base 16: mod_base = OTHER; note = 2'-O-methylcytidine-3'-phosphate
  modified_base 17: mod_base = OTHER; note = 2'-O-methyladenosine-3'-phosphate
  modified_base 18: mod_base = OTHER; note = 2'-O-methylguanosine-3'-phosphate
  modified_base 19: mod_base = OTHER; note = 2'-O-methylcytidine-3'-phosphate
  modified_base 20: mod_base = OTHER; note = 2'-O-methyluridine-3'-phosphate
  modified_base 21: mod_base = OTHER; note = 2'-O-methylguanosine-3'-phosphorothioate
  modified_base 22: mod_base = OTHER; note = 2'-O-methylguanosine-3'-phosphorothioate
  modified_base 23: mod_base = OTHER; note = 2'-O-methyluridine-3'-phosphate
  misc_feature 1: note = RNA
  misc_feature 2: note = DNA
  misc_feature 3..4: note = RNA
  misc_feature 5: note = DNA
  misc_feature 6: note = RNA
  misc_feature 7: note = DNA
  misc_feature 8..11: note = RNA
  misc_feature 12: note = DNA
  misc_feature 13..23: note = RNA
accactgcagtaattcagctggt

SEQ ID NO: 7489 - DNA, 23 bp, synthetic construct
  source 1..23: mol_type = other DNA
  modified_base 1: mod_base = OTHER; note = 2'-O-methyladenosine-3'-phosphorothioate
  modified_base 2: mod_base = OTHER; note = 2'-deoxycytidine-3'-phosphorothioate
  modified_base 3: mod_base = OTHER; note = 2'-O-methylcytidine-3'-phosphate
  modified_base 4: mod_base = OTHER; note = 2'-O-methylcytidine-3'-phosphate
  modified_base 6: mod_base = OTHER; note = 2'-O-methylcytidine-3'-phosphate
  modified_base 8: mod_base = OTHER; note = 2'-O-methylguanosine-3'-phosphate
  modified_base 9: mod_base = OTHER; note = 2'-O-methylcytidine-3'-phosphate
  modified_base 10: mod_base = OTHER; note = 2'-O-methyladenosine-3'-phosphate
  modified_base 11: mod_base = OTHER; note = 2'-O-methylguanosine-3'-phosphate
  modified_base 13: mod_base = OTHER; note = 2'-O-methyladenosine-3'-phosphate
  modified_base 14: mod_base = OTHER; note = 2'-fluoroadenosine-3'-phosphate
  modified_base 15: mod_base = OTHER; note = 2'-O-methyluridine-3'-phosphate
  modified_base 16: mod_base = OTHER; note = 2'-O-methyluridine-3'-phosphate
  modified_base 17: mod_base = OTHER; note = 2'-O-methylcytidine-3'-phosphate
  modified_base 18: mod_base = OTHER; note = 2'-O-methyladenosine-3'-phosphate
  modified_base 19: mod_base = OTHER; note = 2'-O-methylguanosine-3'-phosphate
  modified_base 20: mod_base = OTHER; note = 2'-O-methylcytidine-3'-phosphate
  modified_base 21: mod_base = OTHER; note = 2'-O-methyluridine-3'-phosphorothioate
  modified_base 22: mod_base = OTHER; note = 2'-O-methylguanosine-3'-phosphorothioate
  modified_base 23: mod_base = OTHER; note = 2'-O-methylguanosine-3'-phosphate
  misc_feature 1: note = RNA
  misc_feature 2: note = DNA
  misc_feature 3..4: note = RNA
  misc_feature 5: note = DNA
  misc_feature 6: note = RNA
  misc_feature 7: note = DNA
  misc_feature 8..11: note = RNA
  misc_feature 12: note = DNA
  misc_feature 13..23: note = RNA
acccactgcagtaattcagctgg

SEQ ID NO: 7490 - DNA, 23 bp, synthetic construct
  source 1..23: mol_type = other DNA
  modified_base 1: mod_base = OTHER; note = 2'-O-methyladenosine-3'-phosphorothioate
  modified_base 2: mod_base = OTHER; note = 2'-deoxyguanosine-3'-phosphorothioate
  modified_base 3: mod_base = OTHER; note = 2'-O-methylcytidine-3'-phosphate
  modified_base 4: mod_base = OTHER; note = 2'-O-methylcytidine-3'-phosphate
  modified_base 6: mod_base = OTHER; note = 2'-O-methyladenosine-3'-phosphate
  modified_base 8: mod_base = OTHER; note = 2'-O-methyluridine-3'-phosphate
  modified_base 9: mod_base = OTHER; note = 2'-O-methylguanosine-3'-phosphate
  modified_base 10: mod_base = OTHER; note = 2'-O-methylcytidine-3'-phosphate
  modified_base 11: mod_base = OTHER; note = 2'-O-methyladenosine-3'-phosphate
  modified_base 13: mod_base = OTHER; note = 2'-O-methyluridine-3'-phosphate
  modified_base 14: mod_base = OTHER; note = 2'-fluoroadenosine-3'-phosphate
  modified_base 15: mod_base = OTHER; note = 2'-O-methyladenosine-3'-phosphate
  modified_base 16: mod_base = OTHER; note = 2'-O-methyluridine-3'-phosphate
  modified_base 17: mod_base = OTHER; note = 2'-O-methyluridine-3'-phosphate
  modified_base 18: mod_base = OTHER; note = 2'-O-methylcytidine-3'-phosphate
  modified_base 19: mod_base = OTHER; note = 2'-O-methyladenosine-3'-phosphate
  modified_base 20: mod_base = OTHER; note = 2'-O-methylguanosine-3'-phosphate
  modified_base 21: mod_base = OTHER; note = 2'-O-methylcytidine-3'-phosphorothioate
  modified_base 22: mod_base = OTHER; note = 2'-O-methyluridine-3'-phosphorothioate
  modified_base 23: mod_base = OTHER; note = 2'-O-methylguanosine-3'-phosphate
  misc_feature 1: note = RNA
  misc_feature 2: note = DNA
  misc_feature 3..4: note = RNA
  misc_feature 5: note = DNA
  misc_feature 6: note = RNA
  misc_feature 7: note = DNA
  misc_feature 8..11: note = RNA
  misc_feature 12: note = DNA
  misc_feature 13..23: note = RNA
agcccactgcagtaattcagctg

SEQ ID NO: 7491 - DNA, 23 bp, synthetic construct
  source 1..23: mol_type = other DNA
  modified_base 1: mod_base = OTHER; note = 2'-O-methyladenosine-3'-phosphorothioate
  modified_base 2: mod_base = OTHER; note = 2'-deoxythimidine-3'-phosphorothioate
  modified_base 3: mod_base = OTHER; note = 2'-O-methylguanosine-3'-phosphate
  modified_base 4: mod_base = OTHER; note = 2'-O-methylcytidine-3'-phosphate
  modified_base 6: mod_base = OTHER; note = 2'-O-methylcytidine-3'-phosphate
  modified_base 8: mod_base = OTHER; note = 2'-O-methylcytidine-3'-phosphate
  modified_base 9: mod_base = OTHER; note = 2'-O-methyluridine-3'-phosphate
  modified_base 10: mod_base = OTHER; note = 2'-O-methylguanosine-3'-phosphate
  modified_base 11: mod_base = OTHER; note = 2'-O-methylcytidine-3'-phosphate
  modified_base 13: mod_base = OTHER; note = 2'-O-methylguanosine-3'-phosphate
  modified_base 14: mod_base = OTHER; note = 2'-fluorouridine-3'-phosphate
  modified_base 15: mod_base = OTHER; note = 2'-O-methyladenosine-3'-phosphate
  modified_base 16: mod_base = OTHER; note = 2'-O-methyladenosine-3'-phosphate
  modified_base 17: mod_base = OTHER; note = 2'-O-methyluridine-3'-phosphate
  modified_base 18: mod_base = OTHER; note = 2'-O-methyluridine-3'-phosphate
  modified_base 19: mod_base = OTHER; note = 2'-O-methylcytidine-3'-phosphate
  modified_base 20: mod_base = OTHER; note = 2'-O-methyladenosine-3'-phosphate
  modified_base 21: mod_base = OTHER; note = 2'-O-methylguanosine-3'-phosphorothioate
  modified_base 22: mod_base = OTHER; note = 2'-O-methylcytidine-3'-phosphorothioate
  modified_base 23: mod_base = OTHER; note = 2'-O-methyluridine-3'-phosphate
  misc_feature 1: note = RNA
  misc_feature 2: note = DNA
  misc_feature 3..4: note = RNA
  misc_feature 5: note = DNA
  misc_feature 6: note = RNA
  misc_feature 7: note = DNA
  misc_feature 8..11: note = RNA
  misc_feature 12: note = DNA
  misc_feature 13..23: note = RNA
atgcccactgcagtaattcagct

SEQ ID NO: 7492 - DNA, 23 bp, synthetic construct
  source 1..23: mol_type = other DNA
  modified_base 1: mod_base = OTHER; note = 2'-O-methyladenosine-3'-phosphorothioate
  modified_base 2: mod_base = OTHER; note = 2'-deoxycytidine-3'-phosphorothioate
  modified_base 3: mod_base = OTHER; note = 2'-O-methyluridine-3'-phosphate
  modified_base 4: mod_base = OTHER; note = 2'-O-methylguanosine-3'-phosphate
  modified_base 6: mod_base = OTHER; note = 2'-O-methylcytidine-3'-phosphate
  modified_base 8: mod_base = OTHER; note = 2'-O-methyladenosine-3'-phosphate
  modified_base 9: mod_base = OTHER; note = 2'-O-methylcytidine-3'-phosphate
  modified_base 10: mod_base = OTHER; note = 2'-O-methyluridine-3'-phosphate
  modified_base 11: mod_base = OTHER; note = 2'-O-methylguanosine-3'-phosphate
  modified_base 13: mod_base = OTHER; note = 2'-O-methyladenosine-3'-phosphate
  modified_base 14: mod_base = OTHER; note = 2'-fluoroguanosine-3'-phosphate
  modified_base 15: mod_base = OTHER; note = 2'-O-methyluridine-3'-phosphate
  modified_base 16: mod_base = OTHER; note = 2'-O-methyladenosine-3'-phosphate
  modified_base 17: mod_base = OTHER; note = 2'-O-methyladenosine-3'-phosphate
  modified_base 18: mod_base = OTHER; note = 2'-O-methyluridine-3'-phosphate
  modified_base 19: mod_base = OTHER; note = 2'-O-methyluridine-3'-phosphate
  modified_base 20: mod_base = OTHER; note = 2'-O-methylcytidine-3'-phosphate
  modified_base 21: mod_base = OTHER; note = 2'-O-methyladenosine-3'-phosphorothioate
  modified_base 22: mod_base = OTHER; note = 2'-O-methylguanosine-3'-phosphorothioate
  modified_base 23: mod_base = OTHER; note = 2'-O-methylcytidine-3'-phosphate
  misc_feature 1: note = RNA
  misc_feature 2: note = DNA
  misc_feature 3..4: note = RNA
  misc_feature 5: note = DNA
  misc_feature 6: note = RNA
  misc_feature 7: note = DNA
  misc_feature 8..11: note = RNA
  misc_feature 12: note = DNA
  misc_feature 13..23: note = RNA
actgcccactgcagtaattcagc

SEQ ID NO: 7493 - DNA, 23 bp, synthetic construct
  source 1..23: mol_type = other DNA
  modified_base 1: mod_base = OTHER; note = 2'-O-methyladenosine-3'-phosphorothioate
  modified_base 2: mod_base = OTHER; note = 2'-deoxyadenosine-3'-phosphorothioate
  modified_base 3: mod_base = OTHER; note = 2'-O-methylcytidine-3'-phosphate
  modified_base 4: mod_base = OTHER; note = 2'-O-methyluridine-3'-phosphate
  modified_base 6: mod_base = OTHER; note = 2'-O-methylcytidine-3'-phosphate
  modified_base 8: mod_base = OTHER; note = 2'-O-methylcytidine-3'-phosphate
  modified_base 9: mod_base = OTHER; note = 2'-O-methyladenosine-3'-phosphate
  modified_base 10: mod_base = OTHER; note = 2'-O-methylcytidine-3'-phosphate
  modified_base 11: mod_base = OTHER; note = 2'-O-methyluridine-3'-phosphate
  modified_base 13: mod_base = OTHER; note = 2'-O-methylcytidine-3'-phosphate
  modified_base 14: mod_base = OTHER; note = 2'-fluoroadenosine-3'-phosphate
  modified_base 15: mod_base = OTHER; note = 2'-O-methylguanosine-3'-phosphate
  modified_base 16: mod_base = OTHER; note = 2'-O-methyluridine-3'-phosphate
  modified_base 17: mod_base = OTHER; note = 2'-O-methyladenosine-3'-phosphate
  modified_base 18: mod_base = OTHER; note = 2'-O-methyladenosine-3'-phosphate
  modified_base 19: mod_base = OTHER; note = 2'-O-methyluridine-3'-phosphate
  modified_base 20: mod_base = OTHER; note = 2'-O-methyluridine-3'-phosphate
  modified_base 21: mod_base = OTHER; note = 2'-O-methylcytidine-3'-phosphorothioate
  modified_base 22: mod_base = OTHER; note = 2'-O-methyladenosine-3'-phosphorothioate
  modified_base 23: mod_base = OTHER; note = 2'-O-methylguanosine-3'-phosphate
  misc_feature 1: note = RNA
  misc_feature 2: note = DNA
  misc_feature 3..4: note = RNA
  misc_feature 5: note = DNA
  misc_feature 6: note = RNA
  misc_feature 7: note = DNA
  misc_feature 8..11: note = RNA
  misc_feature 12: note = DNA
  misc_feature 13..23: note = RNA
aactgcccactgcagtaattcag

SEQ ID NO: 7494 - DNA, 23 bp, synthetic construct
  source 1..23: mol_type = other DNA
  modified_base 1: mod_base = OTHER; note = 2'-O-methyladenosine-3'-phosphorothioate
  modified_base 2: mod_base = OTHER; note = 2'-deoxyadenosine-3'-phosphorothioate
  modified_base 3: mod_base = OTHER; note = 2'-O-methylguanosine-3'-phosphate
  modified_base 4: mod_base = OTHER; note = 2'-O-methylguanosine-3'-phosphate
  modified_base 6: mod_base = OTHER; note = 2'-O-methylcytidine-3'-phosphate
  modified_base 8: mod_base = OTHER; note = 2'-O-methylcytidine-3'-phosphate
  modified_base 9: mod_base = OTHER; note = 2'-O-methyluridine-3'-phosphate
  modified_base 10: mod_base = OTHER; note = 2'-O-methylguanosine-3'-phosphate
  modified_base 11: mod_base = OTHER; note = 2'-O-methylcytidine-3'-phosphate
  modified_base 13: mod_base = OTHER; note = 2'-O-methylcytidine-3'-phosphate
  modified_base 14: mod_base = OTHER; note = 2'-fluoroadenosine-3'-phosphate
  modified_base 15: mod_base = OTHER; note = 2'-O-methylcytidine-3'-phosphate
  modified_base 16: mod_base = OTHER; note = 2'-O-methyluridine-3'-phosphate
  modified_base 17: mod_base = OTHER; note = 2'-O-methylguanosine-3'-phosphate
  modified_base 18: mod_base = OTHER; note = 2'-O-methylcytidine-3'-phosphate
  modified_base 19: mod_base = OTHER; note = 2'-O-methyladenosine-3'-phosphate
  modified_base 20: mod_base = OTHER; note = 2'-O-methylguanosine-3'-phosphate
  modified_base 21: mod_base = OTHER; note = 2'-O-methyluridine-3'-phosphorothioate
  modified_base 22: mod_base = OTHER; note = 2'-O-methyladenosine-3'-phosphorothioate
  modified_base 23: mod_base = OTHER; note = 2'-O-methyladenosine-3'-phosphate
  misc_feature 1: note = RNA
  misc_feature 2: note = DNA
  misc_feature 3..4: note = RNA
  misc_feature 5: note = DNA
  misc_feature 6: note = RNA
  misc_feature 7: note = DNA
  misc_feature 8..11: note = RNA
  misc_feature 12: note = DNA
  misc_feature 13..23: note = RNA
aagggcactgcccactgcagtaa

SEQ ID NO: 7495 - DNA, 23 bp, synthetic construct
  source 1..23: mol_type = other DNA
  modified_base 1: mod_base = OTHER; note = 2'-O-methyladenosine-3'-phosphorothioate
  modified_base 2: mod_base = OTHER; note = 2'-deoxyguanosine-3'-phosphorothioate
  modified_base 3: mod_base = OTHER; note = 2'-O-methyladenosine-3'-phosphate
  modified_base 4: mod_base = OTHER; note = 2'-O-methyladenosine-3'-phosphate
  modified_base 6: mod_base = OTHER; note = 2'-O-methylguanosine-3'-phosphate
  modified_base 8: mod_base = OTHER; note = 2'-O-methylguanosine-3'-phosphate
  modified_base 9: mod_base = OTHER; note = 2'-O-methylguanosine-3'-phosphate
  modified_base 10: mod_base = OTHER; note = 2'-O-methylcytidine-3'-phosphate
  modified_base 11: mod_base = OTHER; note = 2'-O-methyladenosine-3'-phosphate
  modified_base 13: mod_base = OTHER; note = 2'-O-methylcytidine-3'-phosphate
  modified_base 14: mod_base = OTHER; note = 2'-fluoroadenosine-3'-phosphate
  modified_base 15: mod_base = OTHER; note = 2'-O-methyladenosine-3'-phosphate
  modified_base 16: mod_base = OTHER; note = 2'-O-methyluridine-3'-phosphate
  modified_base 17: mod_base = OTHER; note = 2'-O-methylguanosine-3'-phosphate
  modified_base 18: mod_base = OTHER; note = 2'-O-methylcytidine-3'-phosphate
  modified_base 19: mod_base = OTHER; note = 2'-O-methylcytidine-3'-phosphate
  modified_base 20: mod_base = OTHER; note = 2'-O-methyluridine-3'-phosphate
  modified_base 21: mod_base = OTHER; note = 2'-O-methylguanosine-3'-phosphorothioate
  modified_base 22: mod_base = OTHER; note = 2'-O-methylguanosine-3'-phosphorothioate
  modified_base 23: mod_base = OTHER; note = 2'-O-methylguanosine-3'-phosphate
  misc_feature 1: note = RNA
  misc_feature 2: note = DNA
  misc_feature 3..4: note = RNA
  misc_feature 5: note = DNA
  misc_feature 6: note = RNA
  misc_feature 7: note = DNA
  misc_feature 8..11: note = RNA
  misc_feature 12: note = DNA
  misc_feature 13..23: note = RNA
agaaagaggcagcaatgcctggg

SEQ ID NO: 7496 - DNA, 23 bp, synthetic construct
  source 1..23: mol_type = other DNA
  modified_base 1: mod_base = OTHER; note = 2'-O-methyladenosine-3'-phosphorothioate
  modified_base 2: mod_base = OTHER; note = 2'-deoxyguanosine-3'-phosphorothioate
  modified_base 3: mod_base = OTHER; note = 2'-O-methylguanosine-3'-phosphate
  modified_base 4: mod_base = OTHER; note = 2'-O-methyladenosine-3'-phosphate
  modified_base 6: mod_base = OTHER; note = 2'-O-methyladenosine-3'-phosphate
  modified_base 8: mod_base = OTHER; note = 2'-O-methyladenosine-3'-phosphate
  modified_base 9: mod_base = OTHER; note = 2'-O-methylguanosine-3'-phosphate
  modified_base 10: mod_base = OTHER; note = 2'-O-methylguanosine-3'-phosphate
  modified_base 11: mod_base = OTHER; note = 2'-O-methylcytidine-3'-phosphate
  modified_base 13: mod_base = OTHER; note = 2'-O-methylguanosine-3'-phosphate
  modified_base 14: mod_base = OTHER; note = 2'-fluorocytidine-3'-phosphate
  modified_base 15: mod_base = OTHER; note = 2'-O-methyladenosine-3'-phosphate
  modified_base 16: mod_base = OTHER; note = 2'-O-methyladenosine-3'-phosphate
  modified_base 17: mod_base = OTHER; note = 2'-O-methyluridine-3'-phosphate
  modified_base 18: mod_base = OTHER; note = 2'-O-methylguanosine-3'-phosphate
  modified_base 19: mod_base = OTHER; note = 2'-O-methylcytidine-3'-phosphate
  modified_base 20: mod_base = OTHER; note = 2'-O-methylcytidine-3'-phosphate
  modified_base 21: mod_base = OTHER; note = 2'-O-methyluridine-3'-phosphorothioate
  modified_base 22: mod_base = OTHER; note = 2'-O-methylguanosine-3'-phosphorothioate
  modified_base 23: mod_base = OTHER; note = 2'-O-methylguanosine-3'-phosphate
  misc_feature 1: note = RNA
  misc_feature 2: note = DNA
  misc_feature 3..4: note = RNA
  misc_feature 5: note = DNA
  misc_feature 6: note = RNA
  misc_feature 7: note = DNA
  misc_feature 8..11: note = RNA
  misc_feature 12: note = DNA
  misc_feature 13..23: note = RNA
aggaaagaggcagcaatgcctgg

SEQ ID NO: 7497 - DNA, 23 bp, synthetic construct
  source 1..23: mol_type = other DNA
  modified_base 1: mod_base = OTHER; note = 2'-O-methyladenosine-3'-phosphorothioate
  modified_base 2: mod_base = OTHER; note = 2'-deoxythimidine-3'-phosphorothioate
  modified_base 3: mod_base = OTHER; note = 2'-O-methylguanosine-3'-phosphate
  modified_base 4: mod_base = OTHER; note = 2'-O-methylguanosine-3'-phosphate
  modified_base 6: mod_base = OTHER; note = 2'-O-methyladenosine-3'-phosphate
  modified_base 8: mod_base = OTHER; note = 2'-O-methylguanosine-3'-phosphate
  modified_base 9: mod_base = OTHER; note = 2'-O-methyladenosine-3'-phosphate
  modified_base 10: mod_base = OTHER; note = 2'-O-methylguanosine-3'-phosphate
  modified_base 11: mod_base = OTHER; note = 2'-O-methylguanosine-3'-phosphate
  modified_base 13: mod_base = OTHER; note = 2'-O-methyladenosine-3'-phosphate
  modified_base 14: mod_base = OTHER; note = 2'-fluoroguanosine-3'-phosphate
  modified_base 15: mod_base = OTHER; note = 2'-O-methylcytidine-3'-phosphate
  modified_base 16: mod_base = OTHER; note = 2'-O-methyladenosine-3'-phosphate
  modified_base 17: mod_base = OTHER; note = 2'-O-methyladenosine-3'-phosphate
  modified_base 18: mod_base = OTHER; note = 2'-O-methyluridine-3'-phosphate
  modified_base 19: mod_base = OTHER; note = 2'-O-methylguanosine-3'-phosphate
  modified_base 20: mod_base = OTHER; note = 2'-O-methylcytidine-3'-phosphate
  modified_base 21: mod_base = OTHER; note = 2'-O-methylcytidine-3'-phosphorothioate
  modified_base 22: mod_base = OTHER; note = 2'-O-methyluridine-3'-phosphorothioate
  modified_base 23: mod_base = OTHER; note = 2'-O-methylguanosine-3'-phosphate
  misc_feature 1: note = RNA
  misc_feature 2: note = DNA
  misc_feature 3..4: note = RNA
  misc_feature 5: note = DNA
  misc_feature 6: note = RNA
  misc_feature 7: note = DNA
  misc_feature 8..11: note = RNA
  misc_feature 12: note = DNA
  misc_feature 13..23: note = RNA
atggaaagaggcagcaatgcctg

SEQ ID NO: 7498 - DNA, 23 bp, synthetic construct
  source 1..23: mol_type = other DNA
  modified_base 1: mod_base = OTHER; note = 2'-O-methyladenosine-3'-phosphorothioate
  modified_base 2: mod_base = OTHER; note = 2'-deoxyadenosine-3'-phosphorothioate
  modified_base 3: mod_base = OTHER; note = 2'-O-methyluridine-3'-phosphate
  modified_base 4: mod_base = OTHER; note = 2'-O-methylguanosine-3'-phosphate
  modified_base 6: mod_base = OTHER; note = 2'-O-methyladenosine-3'-phosphate
  modified_base 8: mod_base = OTHER; note = 2'-O-methyladenosine-3'-phosphate
  modified_base 9: mod_base = OTHER; note = 2'-O-methylguanosine-3'-phosphate
  modified_base 10: mod_base = OTHER; note = 2'-O-methyladenosine-3'-phosphate
  modified_base 11: mod_base = OTHER; note = 2'-O-methylguanosine-3'-phosphate
  modified_base 13: mod_base = OTHER; note = 2'-O-methylcytidine-3'-phosphate
  modified_base 14: mod_base = OTHER; note = 2'-fluoroadenosine-3'-phosphate
  modified_base 15: mod_base = OTHER; note = 2'-O-methylguanosine-3'-phosphate
  modified_base 16: mod_base = OTHER; note = 2'-O-methylcytidine-3'-phosphate
  modified_base 17: mod_base = OTHER; note = 2'-O-methyladenosine-3'-phosphate
  modified_base 18: mod_base = OTHER; note = 2'-O-methyladenosine-3'-phosphate
  modified_base 19: mod_base = OTHER; note = 2'-O-methyluridine-3'-phosphate
  modified_base 20: mod_base = OTHER; note = 2'-O-methylguanosine-3'-phosphate
  modified_base 21: mod_base = OTHER; note = 2'-O-methylcytidine-3'-phosphorothioate
  modified_base 22: mod_base = OTHER; note = 2'-O-methylcytidine-3'-phosphorothioate
  modified_base 23: mod_base = OTHER; note = 2'-O-methyluridine-3'-phosphate
  misc_feature 1: note = RNA
  misc_feature 2: note = DNA
  misc_feature 3..4: note = RNA
  misc_feature 5: note = DNA
  misc_feature 6: note = RNA
  misc_feature 7: note = DNA
  misc_feature 8..11: note = RNA
  misc_feature 12: note = DNA
  misc_feature 13..23: note = RNA
aatggaaagaggcagcaatgcct

SEQ ID NO: 7499 - DNA, 23 bp, synthetic construct
  source 1..23: mol_type = other DNA
  modified_base 1: mod_base = OTHER; note = 2'-O-methyladenosine-3'-phosphorothioate
  modified_base 2: mod_base = OTHER; note = 2'-deoxyadenosine-3'-phosphorothioate
  modified_base 3: mod_base = OTHER; note = 2'-O-methyladenosine-3'-phosphate
  modified_base 4: mod_base = OTHER; note = 2'-O-methyluridine-3'-phosphate
  modified_base 6: mod_base = OTHER; note = 2'-O-methylguanosine-3'-phosphate
  modified_base 8: mod_base = OTHER; note = 2'-O-methyladenosine-3'-phosphate
  modified_base 9: mod_base = OTHER; note = 2'-O-methyladenosine-3'-phosphate
  modified_base 10: mod_base = OTHER; note = 2'-O-methylguanosine-3'-phosphate
  modified_base 11: mod_base = OTHER; note = 2'-O-methyladenosine-3'-phosphate
  modified_base 13: mod_base = OTHER; note = 2'-O-methylguanosine-3'-phosphate
  modified_base 14: mod_base = OTHER; note = 2'-fluorocytidine-3'-phosphate
  modified_base 15: mod_base = OTHER; note = 2'-O-methyladenosine-3'-phosphate
  modified_base 16: mod_base = OTHER; note = 2'-O-methylguanosine-3'-phosphate
  modified_base 17: mod_base = OTHER; note = 2'-O-methylcytidine-3'-phosphate
  modified_base 18: mod_base = OTHER; note = 2'-O-methyladenosine-3'-phosphate
  modified_base 19: mod_base = OTHER; note = 2'-O-methyladenosine-3'-phosphate
  modified_base 20: mod_base = OTHER; note = 2'-O-methyluridine-3'-phosphate
  modified_base 21: mod_base = OTHER; note = 2'-O-methylguanosine-3'-phosphorothioate
  modified_base 22: mod_base = OTHER; note = 2'-O-methylcytidine-3'-phosphorothioate
  modified_base 23: mod_base = OTHER; note = 2'-O-methylcytidine-3'-phosphate
  misc_feature 1: note = RNA
  misc_feature 2: note = DNA
  misc_feature 3..4: note = RNA
  misc_feature 5: note = DNA
  misc_feature 6: note = RNA
  misc_feature 7: note = DNA
  misc_feature 8..11: note = RNA
  misc_feature 12: note = DNA
  misc_feature 13..23: note = RNA
aaatggaaagaggcagcaatgcc

SEQ ID NO: 7500 - DNA, 23 bp, synthetic construct
  source 1..23: mol_type = other DNA
  modified_base 1: mod_base = OTHER; note = 2'-O-methyladenosine-3'-phosphorothioate
  modified_base 2: mod_base = OTHER; note = 2'-deoxyguanosine-3'-phosphorothioate
  modified_base 3: mod_base = OTHER; note = 2'-O-methyladenosine-3'-phosphate
  modified_base 4: mod_base = OTHER; note = 2'-O-methyladenosine-3'-phosphate
  modified_base 6: mod_base = OTHER; note = 2'-O-methylguanosine-3'-phosphate
  modified_base 8: mod_base = OTHER; note = 2'-O-methyladenosine-3'-phosphate
  modified_base 9: mod_base = OTHER; note = 2'-O-methyladenosine-3'-phosphate
  modified_base 10: mod_base = OTHER; note = 2'-O-methyladenosine-3'-phosphate
  modified_base 11: mod_base = OTHER; note = 2'-O-methylguanosine-3'-phosphate
  modified_base 13: mod_base = OTHER; note = 2'-O-methylguanosine-3'-phosphate
  modified_base 14: mod_base = OTHER; note = 2'-fluoroguanosine-3'-phosphate
  modified_base 15: mod_base = OTHER; note = 2'-O-methylcytidine-3'-phosphate
  modified_base 16: mod_base = OTHER; note = 2'-O-methyladenosine-3'-phosphate
  modified_base 17: mod_base = OTHER; note = 2'-O-methylguanosine-3'-phosphate
  modified_base 18: mod_base = OTHER; note = 2'-O-methylcytidine-3'-phosphate
  modified_base 19: mod_base = OTHER; note = 2'-O-methyladenosine-3'-phosphate
  modified_base 20: mod_base = OTHER; note = 2'-O-methyladenosine-3'-phosphate
  modified_base 21: mod_base = OTHER; note = 2'-O-methyluridine-3'-phosphorothioate
  modified_base 22: mod_base = OTHER; note = 2'-O-methylguanosine-3'-phosphorothioate
  modified_base 23: mod_base = OTHER; note = 2'-O-methylcytidine-3'-phosphate
  misc_feature 1: note = RNA
  misc_feature 2: note = DNA
  misc_feature 3..4: note = RNA
  misc_feature 5: note = DNA
  misc_feature 6: note = RNA
  misc_feature 7: note = DNA
  misc_feature 8..11: note = RNA
  misc_feature 12: note = DNA
  misc_feature 13..23: note = RNA
agaatggaaagaggcagcaatgc

SEQ ID NO: 7501 - DNA, 23 bp, synthetic construct
  source 1..23: mol_type = other DNA
  modified_base 1: mod_base = OTHER; note = 2'-O-methyladenosine-3'-phosphorothioate
  modified_base 2: mod_base = OTHER; note = 2'-deoxyadenosine-3'-phosphorothioate
  modified_base 3: mod_base = OTHER; note = 2'-O-methylguanosine-3'-phosphate
  modified_base 4: mod_base = OTHER; note = 2'-O-methyladenosine-3'-phosphate
  modified_base 6: mod_base = OTHER; note = 2'-O-methyluridine-3'-phosphate
  modified_base 8: mod_base = OTHER; note = 2'-O-methylguanosine-3'-phosphate
  modified_base 9: mod_base = OTHER; note = 2'-O-methyladenosine-3'-phosphate
  modified_base 10: mod_base = OTHER; note = 2'-O-methyladenosine-3'-phosphate
  modified_base 11: mod_base = OTHER; note = 2'-O-methyladenosine-3'-phosphate
  modified_base 13: mod_base = OTHER; note = 2'-O-methyladenosine-3'-phosphate
  modified_base 14: mod_base = OTHER; note = 2'-fluoroguanosine-3'-phosphate
  modified_base 15: mod_base = OTHER; note = 2'-O-methylguanosine-3'-phosphate
  modified_base 16: mod_base = OTHER; note = 2'-O-methylcytidine-3'-phosphate
  modified_base 17: mod_base = OTHER; note = 2'-O-methyladenosine-3'-phosphate
  modified_base 18: mod_base = OTHER; note = 2'-O-methylguanosine-3'-phosphate
  modified_base 19: mod_base = OTHER; note = 2'-O-methylcytidine-3'-phosphate
  modified_base 20: mod_base = OTHER; note = 2'-O-methyladenosine-3'-phosphate
  modified_base 21: mod_base = OTHER; note = 2'-O-methyladenosine-3'-phosphorothioate
  modified_base 22: mod_base = OTHER; note = 2'-O-methyluridine-3'-phosphorothioate
  modified_base 23: mod_base = OTHER; note = 2'-O-methylguanosine-3'-phosphate
  misc_feature 1: note = RNA
  misc_feature 2: note = DNA
  misc_feature 3..4: note = RNA
  misc_feature 5: note = DNA
  misc_feature 6: note = RNA
  misc_feature 7: note = DNA
  misc_feature 8..11: note = RNA
  misc_feature 12: note = DNA
  misc_feature 13..23: note = RNA
aagaatggaaagaggcagcaatg

SEQ ID NO: 7502 - DNA, 23 bp, synthetic construct
  source 1..23: mol_type = other DNA
  modified_base 1: mod_base = OTHER; note = 2'-O-methyladenosine-3'-phosphorothioate
  modified_base 2: mod_base = OTHER; note = 2'-deoxycytidine-3'-phosphorothioate
  modified_base 3: mod_base = OTHER; note = 2'-O-methyladenosine-3'-phosphate
  modified_base 4: mod_base = OTHER; note = 2'-O-methylguanosine-3'-phosphate
  modified_base 6: mod_base = OTHER; note = 2'-O-methyladenosine-3'-phosphate
  modified_base 8: mod_base = OTHER; note = 2'-O-methylguanosine-3'-phosphate
  modified_base 9: mod_base = OTHER; note = 2'-O-methylguanosine-3'-phosphate
  modified_base 10: mod_base = OTHER; note = 2'-O-methyladenosine-3'-phosphate
  modified_base 11: mod_base = OTHER; note = 2'-O-methyladenosine-3'-phosphate
  modified_base 13: mod_base = OTHER; note = 2'-O-methylguanosine-3'-phosphate
  modified_base 14: mod_base = OTHER; note = 2'-fluoroadenosine-3'-phosphate
  modified_base 15: mod_base = OTHER; note = 2'-O-methylguanosine-3'-phosphate
  modified_base 16: mod_base = OTHER; note = 2'-O-methylguanosine-3'-phosphate
  modified_base 17: mod_base = OTHER; note = 2'-O-methylcytidine-3'-phosphate
  modified_base 18: mod_base = OTHER; note = 2'-O-methyladenosine-3'-phosphate
  modified_base 19: mod_base = OTHER; note = 2'-O-methylguanosine-3'-phosphate
  modified_base 20: mod_base = OTHER; note = 2'-O-methylcytidine-3'-phosphate
  modified_base 21: mod_base = OTHER; note = 2'-O-methyladenosine-3'-phosphorothioate
  modified_base 22: mod_base = OTHER; note = 2'-O-methyladenosine-3'-phosphorothioate
  modified_base 23: mod_base = OTHER; note = 2'-O-methyluridine-3'-phosphate
  misc_feature 1: note = RNA
  misc_feature 2: note = DNA
  misc_feature 3..4: note = RNA
  misc_feature 5: note = DNA
  misc_feature 6: note = RNA
  misc_feature 7: note = DNA
  misc_feature 8..11: note = RNA
  misc_feature 12: note = DNA
  misc_feature 13..23: note = RNA
acagaatggaaagaggcagcaat

SEQ ID NO: 7503 - DNA, 23 bp, synthetic construct
  source 1..23: mol_type = other DNA
  modified_base 1: mod_base = OTHER; note = 2'-O-methyladenosine-3'-phosphorothioate
  modified_base 2: mod_base = OTHER; note = 2'-deoxyguanosine-3'-phosphorothioate
  modified_base 3: mod_base = OTHER; note = 2'-O-methylcytidine-3'-phosphate
  modified_base 4: mod_base = OTHER; note = 2'-O-methyladenosine-3'-phosphate
  modified_base 6: mod_base = OTHER; note = 2'-O-methyladenosine-3'-phosphate
  modified_base 8: mod_base = OTHER; note = 2'-O-methyluridine-3'-phosphate
  modified_base 9: mod_base = OTHER; note = 2'-O-methylguanosine-3'-phosphate
  modified_base 10: mod_base = OTHER; note = 2'-O-methylguanosine-3'-phosphate
  modified_base 11: mod_base = OTHER; note = 2'-O-methyladenosine-3'-phosphate
  modified_base 13: mod_base = OTHER; note = 2'-O-methyladenosine-3'-phosphate
  modified_base 14: mod_base = OTHER; note = 2'-fluoroguanosine-3'-phosphate
  modified_base 15: mod_base = OTHER; note = 2'-O-methyladenosine-3'-phosphate
  modified_base 16: mod_base = OTHER; note = 2'-O-methylguanosine-3'-phosphate
  modified_base 17: mod_base = OTHER; note = 2'-O-methylguanosine-3'-phosphate
  modified_base 18: mod_base = OTHER; note = 2'-O-methylcytidine-3'-phosphate
  modified_base 19: mod_base = OTHER; note = 2'-O-methyladenosine-3'-phosphate
  modified_base 20: mod_base = OTHER; note = 2'-O-methylguanosine-3'-phosphate
  modified_base 21: mod_base = OTHER; note = 2'-O-methylcytidine-3'-phosphorothioate
  modified_base 22: mod_base = OTHER; note = 2'-O-methyladenosine-3'-phosphorothioate
  modified_base 23: mod_base = OTHER; note = 2'-O-methyladenosine-3'-phosphate
  misc_feature 1: note = RNA
  misc_feature 2: note = DNA
  misc_feature 3..4: note = RNA
  misc_feature 5: note = DNA
  misc_feature 6: note = RNA
  misc_feature 7: note = DNA
  misc_feature 8..11: note = RNA
  misc_feature 12: note = DNA
  misc_feature 13..23: note = RNA
agcagaatggaaagaggcagcaa

SEQ ID NO: 7504 - DNA, 23 bp, synthetic construct
  source 1..23: mol_type = other DNA
  modified_base 1: mod_base = OTHER; note = 2'-O-methyladenosine-3'-phosphorothioate
  modified_base 2: mod_base = OTHER; note = 2'-deoxyguanosine-3'-phosphorothioate
  modified_base 3: mod_base = OTHER; note = 2'-O-methylguanosine-3'-phosphate
  modified_base 4: mod_base = OTHER; note = 2'-O-methylcytidine-3'-phosphate
  modified_base 6: mod_base = OTHER; note = 2'-O-methylguanosine-3'-phosphate
  modified_base 8: mod_base = OTHER; note = 2'-O-methyladenosine-3'-phosphate
  modified_base 9: mod_base = OTHER; note = 2'-O-methyluridine-3'-phosphate
  modified_base 10: mod_base = OTHER; note = 2'-O-methylguanosine-3'-phosphate
  modified_base 11: mod_base = OTHER; note = 2'-O-methylguanosine-3'-phosphate
  modified_base 13: mod_base = OTHER; note = 2'-O-methyladenosine-3'-phosphate
  modified_base 14: mod_base = OTHER; note = 2'-fluoroadenosine-3'-phosphate
  modified_base 15: mod_base = OTHER; note = 2'-O-methylguanosine-3'-phosphate
  modified_base 16: mod_base = OTHER; note = 2'-O-methyladenosine-3'-phosphate
  modified_base 17: mod_base = OTHER; note = 2'-O-methylguanosine-3'-phosphate
  modified_base 18: mod_base = OTHER; note = 2'-O-methylguanosine-3'-phosphate
  modified_base 19: mod_base = OTHER; note = 2'-O-methylcytidine-3'-phosphate
  modified_base 20: mod_base = OTHER; note = 2'-O-methyladenosine-3'-phosphate
  modified_base 21: mod_base = OTHER; note = 2'-O-methylguanosine-3'-phosphorothioate
  modified_base 22: mod_base = OTHER; note = 2'-O-methylcytidine-3'-phosphorothioate
  modified_base 23: mod_base = OTHER; note = 2'-O-methyladenosine-3'-phosphate
  misc_feature 1: note = RNA
  misc_feature 2: note = DNA
  misc_feature 3..4: note = RNA
  misc_feature 5: note = DNA
  misc_feature 6: note = RNA
  misc_feature 7: note = DNA
  misc_feature 8..11: note = RNA
  misc_feature 12: note = DNA
  misc_feature 13..23: note = RNA
aggcagaatggaaagaggcagca

SEQ ID NO: 7505 - DNA, 23 bp, synthetic construct
  source 1..23: mol_type = other DNA
  modified_base 1: mod_base = OTHER; note = 2'-O-methyladenosine-3'-phosphorothioate
  modified_base 2: mod_base = OTHER; note = 2'-deoxycytidine-3'-phosphorothioate
  modified_base 3: mod_base = OTHER; note = 2'-O-methylguanosine-3'-phosphate
  modified_base 4: mod_base = OTHER; note = 2'-O-methylguanosine-3'-phosphate
  modified_base 6: mod_base = OTHER; note = 2'-O-methyladenosine-3'-phosphate
  modified_base 8: mod_base = OTHER; note = 2'-O-methyladenosine-3'-phosphate
  modified_base 9: mod_base = OTHER; note = 2'-O-methyladenosine-3'-phosphate
  modified_base 10: mod_base = OTHER; note = 2'-O-methyluridine-3'-phosphate
  modified_base 11: mod_base = OTHER; note = 2'-O-methylguanosine-3'-phosphate
  modified_base 13: mod_base = OTHER; note = 2'-O-methyladenosine-3'-phosphate
  modified_base 14: mod_base = OTHER; note = 2'-fluoroadenosine-3'-phosphate
  modified_base 15: mod_base = OTHER; note = 2'-O-methyladenosine-3'-phosphate
  modified_base 16: mod_base = OTHER; note = 2'-O-methylguanosine-3'-phosphate
  modified_base 17: mod_base = OTHER; note = 2'-O-methyladenosine-3'-phosphate
  modified_base 18: mod_base = OTHER; note = 2'-O-methylguanosine-3'-phosphate
  modified_base 19: mod_base = OTHER; note = 2'-O-methylguanosine-3'-phosphate
  modified_base 20: mod_base = OTHER; note = 2'-O-methylcytidine-3'-phosphate
  modified_base 21: mod_base = OTHER; note = 2'-O-methyladenosine-3'-phosphorothioate
  modified_base 22: mod_base = OTHER; note = 2'-O-methylguanosine-3'-phosphorothioate
  modified_base 23: mod_base = OTHER; note = 2'-O-methylcytidine-3'-phosphate
  misc_feature 1: note = RNA
  misc_feature 2: note = DNA
  misc_feature 3..4: note = RNA
  misc_feature 5: note = DNA
  misc_feature 6: note = RNA
  misc_feature 7: note = DNA
  misc_feature 8..11: note = RNA
  misc_feature 12: note = DNA
  misc_feature 13..23: note = RNA
acggcagaatggaaagaggcagc

SEQ ID NO: 7506 - DNA, 23 bp, synthetic construct
  source 1..23: mol_type = other DNA
  modified_base 1: mod_base = OTHER; note = 2'-O-methyladenosine-3'-phosphorothioate
  modified_base 2: mod_base = OTHER; note = 2'-deoxyadenosine-3'-phosphorothioate
  modified_base 3: mod_base = OTHER; note = 2'-O-methylcytidine-3'-phosphate
  modified_base 4: mod_base = OTHER; note = 2'-O-methylguanosine-3'-phosphate
  modified_base 6: mod_base = OTHER; note = 2'-O-methylcytidine-3'-phosphate
  modified_base 8: mod_base = OTHER; note = 2'-O-methylguanosine-3'-phosphate
  modified_base 9: mod_base = OTHER; note = 2'-O-methyladenosine-3'-phosphate
  modified_base 10: mod_base = OTHER; note = 2'-O-methyladenosine-3'-phosphate
  modified_base 11: mod_base = OTHER; note = 2'-O-methyluridine-3'-phosphate
  modified_base 13: mod_base = OTHER; note = 2'-O-methylguanosine-3'-phosphate
  modified_base 14: mod_base = OTHER; note = 2'-fluoroadenosine-3'-phosphate
  modified_base 15: mod_base = OTHER; note = 2'-O-methyladenosine-3'-phosphate
  modified_base 16: mod_base = OTHER; note = 2'-O-methyladenosine-3'-phosphate
  modified_base 17: mod_base = OTHER; note = 2'-O-methylguanosine-3'-phosphate
  modified_base 18: mod_base = OTHER; note = 2'-O-methyladenosine-3'-phosphate
  modified_base 19: mod_base = OTHER; note = 2'-O-methylguanosine-3'-phosphate
  modified_base 20: mod_base = OTHER; note = 2'-O-methylguanosine-3'-phosphate
  modified_base 21: mod_base = OTHER; note = 2'-O-methylcytidine-3'-phosphorothioate
  modified_base 22: mod_base = OTHER; note = 2'-O-methyladenosine-3'-phosphorothioate
  modified_base 23: mod_base = OTHER; note = 2'-O-methylguanosine-3'-phosphate
  misc_feature 1: note = RNA
  misc_feature 2: note = DNA
  misc_feature 3..4: note = RNA
  misc_feature 5: note = DNA
  misc_feature 6: note = RNA
  misc_feature 7: note = DNA
  misc_feature 8..11: note = RNA
  misc_feature 12: note = DNA
  misc_feature 13..23: note = RNA
aacggcagaatggaaagaggcag

SEQ ID NO: 7507 - DNA, 23 bp, synthetic construct
  source 1..23: mol_type = other DNA
  modified_base 1: mod_base = OTHER; note = 2'-O-methyladenosine-3'-phosphorothioate
  modified_base 2: mod_base = OTHER; note = 2'-deoxyguanosine-3'-phosphorothioate
  modified_base 3: mod_base = OTHER; note = 2'-O-methyladenosine-3'-phosphate
  modified_base 4: mod_base = OTHER; note = 2'-O-methylcytidine-3'-phosphate
  modified_base 6: mod_base = OTHER; note = 2'-O-methylguanosine-3'-phosphate
  modified_base 8: mod_base = OTHER; note = 2'-O-methyladenosine-3'-phosphate
  modified_base 9: mod_base = OTHER; note = 2'-O-methylguanosine-3'-phosphate
  modified_base 10: mod_base = OTHER; note = 2'-O-methyladenosine-3'-phosphate
  modified_base 11: mod_base = OTHER; note = 2'-O-methyladenosine-3'-phosphate
  modified_base 13: mod_base = OTHER; note = 2'-O-methylguanosine-3'-phosphate
  modified_base 14: mod_base = OTHER; note = 2'-fluoroguanosine-3'-phosphate
  modified_base 15: mod_base = OTHER; note = 2'-O-methyladenosine-3'-phosphate
  modified_base 16: mod_base = OTHER; note = 2'-O-methyladenosine-3'-phosphate
  modified_base 17: mod_base = OTHER; note = 2'-O-methyladenosine-3'-phosphate
  modified_base 18: mod_base = OTHER; note = 2'-O-methylguanosine-3'-phosphate
  modified_base 19: mod_base = OTHER; note = 2'-O-methyladenosine-3'-phosphate
  modified_base 20: mod_base = OTHER; note = 2'-O-methylguanosine-3'-phosphate
  modified_base 21: mod_base = OTHER; note = 2'-O-methylguanosine-3'-phosphorothioate
  modified_base 22: mod_base = OTHER; note = 2'-O-methylcytidine-3'-phosphorothioate
  modified_base 23: mod_base = OTHER; note = 2'-O-methyladenosine-3'-phosphate
  misc_feature 1: note = RNA
  misc_feature 2: note = DNA
  misc_feature 3..4: note = RNA
  misc_feature 5: note = DNA
  misc_feature 6: note = RNA
  misc_feature 7: note = DNA
  misc_feature 8..11: note = RNA
  misc_feature 12: note = DNA
  misc_feature 13..23: note = RNA
agacggcagaatggaaagaggca

SEQ ID NO: 7508 - DNA, 23 bp, synthetic construct
  source 1..23: mol_type = other DNA
  modified_base 1: mod_base = OTHER; note = 2'-O-methyladenosine-3'-phosphorothioate
  modified_base 2: mod_base = OTHER; note = 2'-deoxyadenosine-3'-phosphorothioate
  modified_base 3: mod_base = OTHER; note = 2'-O-methylguanosine-3'-phosphate
  modified_base 4: mod_base = OTHER; note = 2'-O-methyladenosine-3'-phosphate
  modified_base 6: mod_base = OTHER; note = 2'-O-methylguanosine-3'-phosphate
  modified_base 8: mod_base = OTHER; note = 2'-O-methylcytidine-3'-phosphate
  modified_base 9: mod_base = OTHER; note = 2'-O-methyladenosine-3'-phosphate
  modified_base 10: mod_base = OTHER; note = 2'-O-methylguanosine-3'-phosphate
  modified_base 11: mod_base = OTHER; note = 2'-O-methyladenosine-3'-phosphate
  modified_base 13: mod_base = OTHER; note = 2'-O-methyluridine-3'-phosphate
  modified_base 14: mod_base = OTHER; note = 2'-fluoroguanosine-3'-phosphate
  modified_base 15: mod_base = OTHER; note = 2'-O-methylguanosine-3'-phosphate
  modified_base 16: mod_base = OTHER; note = 2'-O-methyladenosine-3'-phosphate
  modified_base 17: mod_base = OTHER; note = 2'-O-methyladenosine-3'-phosphate
  modified_base 18: mod_base = OTHER; note = 2'-O-methyladenosine-3'-phosphate
  modified_base 19: mod_base = OTHER; note = 2'-O-methylguanosine-3'-phosphate
  modified_base 20: mod_base = OTHER; note = 2'-O-methyladenosine-3'-phosphate
  modified_base 21: mod_base = OTHER; note = 2'-O-methylguanosine-3'-phosphorothioate
  modified_base 22: mod_base = OTHER; note = 2'-O-methylguanosine-3'-phosphorothioate
  modified_base 23: mod_base = OTHER; note = 2'-O-methylcytidine-3'-phosphate
  misc_feature 1: note = RNA
  misc_feature 2: note = DNA
  misc_feature 3..4: note = RNA
  misc_feature 5: note = DNA
  misc_feature 6: note = RNA
  misc_feature 7: note = DNA
  misc_feature 8..11: note = RNA
  misc_feature 12: note = DNA
  misc_feature 13..23: note = RNA
aagacggcagaatggaaagaggc

SEQ ID NO: 7509 - DNA, 23 bp, synthetic construct
  source 1..23: mol_type = other DNA
  modified_base 1: mod_base = OTHER; note = 2'-O-methyladenosine-3'-phosphorothioate
  modified_base 2: mod_base = OTHER; note = 2'-deoxyadenosine-3'-phosphorothioate
  modified_base 3: mod_base = OTHER; note = 2'-O-methyladenosine-3'-phosphate
  modified_base 4: mod_base = OTHER; note = 2'-O-methylguanosine-3'-phosphate
  modified_base 6: mod_base = OTHER; note = 2'-O-methylcytidine-3'-phosphate
  modified_base 8: mod_base = OTHER; note = 2'-O-methylguanosine-3'-phosphate
  modified_base 9: mod_base = OTHER; note = 2'-O-methylcytidine-3'-phosphate
  modified_base 10: mod_base = OTHER; note = 2'-O-methyladenosine-3'-phosphate
  modified_base 11: mod_base = OTHER; note = 2'-O-methylguanosine-3'-phosphate
  modified_base 13: mod_base = OTHER; note = 2'-O-methyladenosine-3'-phosphate
  modified_base 14: mod_base = OTHER; note = 2'-fluorouridine-3'-phosphate
  modified_base 15: mod_base = OTHER; note = 2'-O-methylguanosine-3'-phosphate
  modified_base 16: mod_base = OTHER; note = 2'-O-methylguanosine-3'-phosphate
  modified_base 17: mod_base = OTHER; note = 2'-O-methyladenosine-3'-phosphate
  modified_base 18: mod_base = OTHER; note = 2'-O-methyladenosine-3'-phosphate
  modified_base 19: mod_base = OTHER; note = 2'-O-methyladenosine-3'-phosphate
  modified_base 20: mod_base = OTHER; note = 2'-O-methylguanosine-3'-phosphate
  modified_base 21: mod_base = OTHER; note = 2'-O-methyladenosine-3'-phosphorothioate
  modified_base 22: mod_base = OTHER; note = 2'-O-methylguanosine-3'-phosphorothioate
  modified_base 23: mod_base = OTHER; note = 2'-O-methylguanosine-3'-phosphate
  misc_feature 1: note = RNA
  misc_feature 2: note = DNA
  misc_feature 3..4: note = RNA
  misc_feature 5: note = DNA
  misc_feature 6: note = RNA
  misc_feature 7: note = DNA
  misc_feature 8..11: note = RNA
  misc_feature 12: note = DNA
  misc_feature 13..23: note = RNA
aaagacggcagaatggaaagagg

SEQ ID NO: 7510 - DNA, 23 bp, synthetic construct
  source 1..23: mol_type = other DNA
  modified_base 1: mod_base = OTHER; note = 2'-O-methyladenosine-3'-phosphorothioate
  modified_base 2: mod_base = OTHER; note = 2'-deoxyguanosine-3'-phosphorothioate
  modified_base 3: mod_base = OTHER; note = 2'-O-methyladenosine-3'-phosphate
  modified_base 4: mod_base = OTHER; note = 2'-O-methyladenosine-3'-phosphate
  modified_base 6: mod_base = OTHER; note = 2'-O-methyladenosine-3'-phosphate
  modified_base 8: mod_base = OTHER; note = 2'-O-methylguanosine-3'-phosphate
  modified_base 9: mod_base = OTHER; note = 2'-O-methylguanosine-3'-phosphate
  modified_base 10: mod_base = OTHER; note = 2'-O-methylcytidine-3'-phosphate
  modified_base 11: mod_base = OTHER; note = 2'-O-methyladenosine-3'-phosphate
  modified_base 13: mod_base = OTHER; note = 2'-O-methyladenosine-3'-phosphate
  modified_base 14: mod_base = OTHER; note = 2'-fluoroadenosine-3'-phosphate
  modified_base 15: mod_base = OTHER; note = 2'-O-methyluridine-3'-phosphate
  modified_base 16: mod_base = OTHER; note = 2'-O-methylguanosine-3'-phosphate
  modified_base 17: mod_base = OTHER; note = 2'-O-methylguanosine-3'-phosphate
  modified_base 18: mod_base = OTHER; note = 2'-O-methyladenosine-3'-phosphate
  modified_base 19: mod_base = OTHER; note = 2'-O-methyladenosine-3'-phosphate
  modified_base 20: mod_base = OTHER; note = 2'-O-methyladenosine-3'-phosphate
  modified_base 21: mod_base = OTHER; note = 2'-O-methylguanosine-3'-phosphorothioate
  modified_base 22: mod_base = OTHER; note = 2'-O-methyladenosine-3'-phosphorothioate
  modified_base 23: mod_base = OTHER; note = 2'-O-methylguanosine-3'-phosphate
  misc_feature 1: note = RNA
  misc_feature 2: note = DNA
  misc_feature 3..4: note = RNA
  misc_feature 5: note = DNA
  misc_feature 6: note = RNA
  misc_feature 7: note = DNA
  misc_feature 8..11: note = RNA
  misc_feature 12: note = DNA
  misc_feature 13..23: note = RNA
agaagacggcagaatggaaagag

SEQ ID NO: 7511 - DNA, 23 bp, synthetic construct
  source 1..23: mol_type = other DNA
  modified_base 1: mod_base = OTHER; note = 2'-O-methyladenosine-3'-phosphorothioate
  modified_base 2: mod_base = OTHER; note = 2'-deoxythimidine-3'-phosphorothioate
  modified_base 3: mod_base = OTHER; note = 2'-O-methylguanosine-3'-phosphate
  modified_base 4: mod_base = OTHER; note = 2'-O-methyladenosine-3'-phosphate
  modified_base 6: mod_base = OTHER; note = 2'-O-methylguanosine-3'-phosphate
  modified_base 8: mod_base = OTHER; note = 2'-O-methylcytidine-3'-phosphate
  modified_base 9: mod_base = OTHER; note = 2'-O-methylguanosine-3'-phosphate
  modified_base 10: mod_base = OTHER; note = 2'-O-methylguanosine-3'-phosphate
  modified_base 11: mod_base = OTHER; note = 2'-O-methylcytidine-3'-phosphate
  modified_base 13: mod_base = OTHER; note = 2'-O-methylguanosine-3'-phosphate
  modified_base 14: mod_base = OTHER; note = 2'-fluoroadenosine-3'-phosphate
  modified_base 15: mod_base = OTHER; note = 2'-O-methyladenosine-3'-phosphate
  modified_base 16: mod_base = OTHER; note = 2'-O-methyluridine-3'-phosphate
  modified_base 17: mod_base = OTHER; note = 2'-O-methylguanosine-3'-phosphate
  modified_base 18: mod_base = OTHER; note = 2'-O-methylguanosine-3'-phosphate
  modified_base 19: mod_base = OTHER; note = 2'-O-methyladenosine-3'-phosphate
  modified_base 20: mod_base = OTHER; note = 2'-O-methyladenosine-3'-phosphate
  modified_base 21: mod_base = OTHER; note = 2'-O-methyladenosine-3'-phosphorothioate
  modified_base 22: mod_base = OTHER; note = 2'-O-methylguanosine-3'-phosphorothioate
  modified_base 23: mod_base = OTHER; note = 2'-O-methyladenosine-3'-phosphate
  misc_feature 1: note = RNA
  misc_feature 2: note = DNA
  misc_feature 3..4: note = RNA
  misc_feature 5: note = DNA
  misc_feature 6: note = RNA
  misc_feature 7: note = DNA
  misc_feature 8..11: note = RNA
  misc_feature 12: note = DNA
  misc_feature 13..23: note = RNA
atgaagacggcagaatggaaaga

SEQ ID NO: 7512 - DNA, 23 bp, synthetic construct
  source 1..23: mol_type = other DNA
  modified_base 1: mod_base = OTHER; note = 2'-O-methyladenosine-3'-phosphorothioate
  modified_base 2: mod_base = OTHER; note = 2'-deoxycytidine-3'-phosphorothioate
  modified_base 3: mod_base = OTHER; note = 2'-O-methyluridine-3'-phosphate
  modified_base 4: mod_base = OTHER; note = 2'-O-methylguanosine-3'-phosphate
  modified_base 6: mod_base = OTHER; note = 2'-O-methyladenosine-3'-phosphate
  modified_base 8: mod_base = OTHER; note = 2'-O-methyladenosine-3'-phosphate
  modified_base 9: mod_base = OTHER; note = 2'-O-methylcytidine-3'-phosphate
  modified_base 10: mod_base = OTHER; note = 2'-O-methylguanosine-3'-phosphate
  modified_base 11: mod_base = OTHER; note = 2'-O-methylguanosine-3'-phosphate
  modified_base 13: mod_base = OTHER; note = 2'-O-methyladenosine-3'-phosphate
  modified_base 14: mod_base = OTHER; note = 2'-fluoroguanosine-3'-phosphate
  modified_base 15: mod_base = OTHER; note = 2'-O-methyladenosine-3'-phosphate
  modified_base 16: mod_base = OTHER; note = 2'-O-methyladenosine-3'-phosphate
  modified_base 17: mod_base = OTHER; note = 2'-O-methyluridine-3'-phosphate
  modified_base 18: mod_base = OTHER; note = 2'-O-methylguanosine-3'-phosphate
  modified_base 19: mod_base = OTHER; note = 2'-O-methylguanosine-3'-phosphate
  modified_base 20: mod_base = OTHER; note = 2'-O-methyladenosine-3'-phosphate
  modified_base 21: mod_base = OTHER; note = 2'-O-methyladenosine-3'-phosphorothioate
  modified_base 22: mod_base = OTHER; note = 2'-O-methyladenosine-3'-phosphorothioate
  modified_base 23: mod_base = OTHER; note = 2'-O-methylguanosine-3'-phosphate
  misc_feature 1: note = RNA
  misc_feature 2: note = DNA
  misc_feature 3..4: note = RNA
  misc_feature 5: note = DNA
  misc_feature 6: note = RNA
  misc_feature 7: note = DNA
  misc_feature 8..11: note = RNA
  misc_feature 12: note = DNA
  misc_feature 13..23: note = RNA
actgaagacggcagaatggaaag

SEQ ID NO: 7513 - DNA, 23 bp, synthetic construct
  source 1..23: mol_type = other DNA
  modified_base 1: mod_base = OTHER; note = 2'-O-methyladenosine-3'-phosphorothioate
  modified_base 2: mod_base = OTHER; note = 2'-deoxyguanosine-3'-phosphorothioate
  modified_base 3: mod_base = OTHER; note = 2'-O-methylcytidine-3'-phosphate
  modified_base 4: mod_base = OTHER; note = 2'-O-methyluridine-3'-phosphate
  modified_base 6: mod_base = OTHER; note = 2'-O-methyladenosine-3'-phosphate
  modified_base 8: mod_base = OTHER; note = 2'-O-methylguanosine-3'-phosphate
  modified_base 9: mod_base = OTHER; note = 2'-O-methyladenosine-3'-phosphate
  modified_base 10: mod_base = OTHER; note = 2'-O-methylcytidine-3'-phosphate
  modified_base 11: mod_base = OTHER; note = 2'-O-methylguanosine-3'-phosphate
  modified_base 13: mod_base = OTHER; note = 2'-O-methylcytidine-3'-phosphate
  modified_base 14: mod_base = OTHER; note = 2'-fluoroadenosine-3'-phosphate
  modified_base 15: mod_base = OTHER; note = 2'-O-methylguanosine-3'-phosphate
  modified_base 16: mod_base = OTHER; note = 2'-O-methyladenosine-3'-phosphate
  modified_base 17: mod_base = OTHER; note = 2'-O-methyladenosine-3'-phosphate
  modified_base 18: mod_base = OTHER; note = 2'-O-methyluridine-3'-phosphate
  modified_base 19: mod_base = OTHER; note = 2'-O-methylguanosine-3'-phosphate
  modified_base 20: mod_base = OTHER; note = 2'-O-methylguanosine-3'-phosphate
  modified_base 21: mod_base = OTHER; note = 2'-O-methyladenosine-3'-phosphorothioate
  modified_base 22: mod_base = OTHER; note = 2'-O-methyladenosine-3'-phosphorothioate
  modified_base 23: mod_base = OTHER; note = 2'-O-methyladenosine-3'-phosphate
  misc_feature 1: note = RNA
  misc_feature 2: note = DNA
  misc_feature 3..4: note = RNA
  misc_feature 5: note = DNA
  misc_feature 6: note = RNA
  misc_feature 7: note = DNA
  misc_feature 8..11: note = RNA
  misc_feature 12: note = DNA
  misc_feature 13..23: note = RNA
agctgaagacggcagaatggaaa

SEQ ID NO: 7514 - DNA, 23 bp, synthetic construct
  source 1..23: mol_type = other DNA
  modified_base 1: mod_base = OTHER; note = 2'-O-methyladenosine-3'-phosphorothioate
  modified_base 2: mod_base = OTHER; note = 2'-deoxyguanosine-3'-phosphorothioate
  modified_base 3: mod_base = OTHER; note = 2'-O-methylguanosine-3'-phosphate
  modified_base 4: mod_base = OTHER; note = 2'-O-methylcytidine-3'-phosphate
  modified_base 6: mod_base = OTHER; note = 2'-O-methylguanosine-3'-phosphate
  modified_base 8: mod_base = OTHER; note = 2'-O-methyladenosine-3'-phosphate
  modified_base 9: mod_base = OTHER; note = 2'-O-methylguanosine-3'-phosphate
  modified_base 10: mod_base = OTHER; note = 2'-O-methyladenosine-3'-phosphate
  modified_base 11: mod_base = OTHER; note = 2'-O-methylcytidine-3'-phosphate
  modified_base 13: mod_base = OTHER; note = 2'-O-methylguanosine-3'-phosphate
  modified_base 14: mod_base = OTHER; note = 2'-fluorocytidine-3'-phosphate
  modified_base 15: mod_base = OTHER; note = 2'-O-methyladenosine-3'-phosphate
  modified_base 16: mod_base = OTHER; note = 2'-O-methylguanosine-3'-phosphate
  modified_base 17: mod_base = OTHER; note = 2'-O-methyladenosine-3'-phosphate
  modified_base 18: mod_base = OTHER; note = 2'-O-methyladenosine-3'-phosphate
  modified_base 19: mod_base = OTHER; note = 2'-O-methyluridine-3'-phosphate
  modified_base 20: mod_base = OTHER; note = 2'-O-methylguanosine-3'-phosphate
  modified_base 21: mod_base = OTHER; note = 2'-O-methylguanosine-3'-phosphorothioate
  modified_base 22: mod_base = OTHER; note = 2'-O-methyladenosine-3'-phosphorothioate
  modified_base 23: mod_base = OTHER; note = 2'-O-methyladenosine-3'-phosphate
  misc_feature 1: note = RNA
  misc_feature 2: note = DNA
  misc_feature 3..4: note = RNA
  misc_feature 5: note = DNA
  misc_feature 6: note = RNA
  misc_feature 7: note = DNA
  misc_feature 8..11: note = RNA
  misc_feature 12: note = DNA
  misc_feature 13..23: note = RNA
aggctgaagacggcagaatggaa

SEQ ID NO: 7515 - DNA, 23 bp, synthetic construct
  source 1..23: mol_type = other DNA
  modified_base 1: mod_base = OTHER; note = 2'-O-methyladenosine-3'-phosphorothioate
  modified_base 2: mod_base = OTHER; note = 2'-deoxyadenosine-3'-phosphorothioate
  modified_base 3: mod_base = OTHER; note = 2'-O-methylguanosine-3'-phosphate
  modified_base 4: mod_base = OTHER; note = 2'-O-methylguanosine-3'-phosphate
  modified_base 6: mod_base = OTHER; note = 2'-O-methyluridine-3'-phosphate
  modified_base 8: mod_base = OTHER; note = 2'-O-methyladenosine-3'-phosphate
  modified_base 9: mod_base = OTHER; note = 2'-O-methyladenosine-3'-phosphate
  modified_base 10: mod_base = OTHER; note = 2'-O-methylguanosine-3'-phosphate
  modified_base 11: mod_base = OTHER; note = 2'-O-methyladenosine-3'-phosphate
  modified_base 13: mod_base = OTHER; note = 2'-O-methylguanosine-3'-phosphate
  modified_base 14: mod_base = OTHER; note = 2'-fluoroguanosine-3'-phosphate
  modified_base 15: mod_base = OTHER; note = 2'-O-methylcytidine-3'-phosphate
  modified_base 16: mod_base = OTHER; note = 2'-O-methyladenosine-3'-phosphate
  modified_base 17: mod_base = OTHER; note = 2'-O-methylguanosine-3'-phosphate
  modified_base 18: mod_base = OTHER; note = 2'-O-methyladenosine-3'-phosphate
  modified_base 19: mod_base = OTHER; note = 2'-O-methyladenosine-3'-phosphate
  modified_base 20: mod_base = OTHER; note = 2'-O-methyluridine-3'-phosphate
  modified_base 21: mod_base = OTHER; note = 2'-O-methylguanosine-3'-phosphorothioate
  modified_base 22: mod_base = OTHER; note = 2'-O-methylguanosine-3'-phosphorothioate
  modified_base 23: mod_base = OTHER; note = 2'-O-methyladenosine-3'-phosphate
  misc_feature 1: note = RNA
  misc_feature 2: note = DNA
  misc_feature 3..4: note = RNA
  misc_feature 5: note = DNA
  misc_feature 6: note = RNA
  misc_feature 7: note = DNA
  misc_feature 8..11: note = RNA
  misc_feature 12: note = DNA
  misc_feature 13..23: note = RNA
aaggctgaagacggcagaatgga

SEQ ID NO: 7516 - DNA, 23 bp, synthetic construct
  source 1..23: mol_type = other DNA
  modified_base 1: mod_base = OTHER; note = 2'-O-methyladenosine-3'-phosphorothioate
  modified_base 2: mod_base = OTHER; note = 2'-deoxyadenosine-3'-phosphorothioate
  modified_base 3: mod_base = OTHER; note = 2'-O-methylguanosine-3'-phosphate
  modified_base 4: mod_base = OTHER; note = 2'-O-methylguanosine-3'-phosphate
  modified_base 6: mod_base = OTHER; note = 2'-O-methylguanosine-3'-phosphate
  modified_base 8: mod_base = OTHER; note = 2'-O-methylcytidine-3'-phosphate
  modified_base 9: mod_base = OTHER; note = 2'-O-methyluridine-3'-phosphate
  modified_base 10: mod_base = OTHER; note = 2'-O-methylguanosine-3'-phosphate
  modified_base 11: mod_base = OTHER; note = 2'-O-methyladenosine-3'-phosphate
  modified_base 13: mod_base = OTHER; note = 2'-O-methylguanosine-3'-phosphate
  modified_base 14: mod_base = OTHER; note = 2'-fluoroadenosine-3'-phosphate
  modified_base 15: mod_base = OTHER; note = 2'-O-methylcytidine-3'-phosphate
  modified_base 16: mod_base = OTHER; note = 2'-O-methylguanosine-3'-phosphate
  modified_base 17: mod_base = OTHER; note = 2'-O-methylguanosine-3'-phosphate
  modified_base 18: mod_base = OTHER; note = 2'-O-methylcytidine-3'-phosphate
  modified_base 19: mod_base = OTHER; note = 2'-O-methyladenosine-3'-phosphate
  modified_base 20: mod_base = OTHER; note = 2'-O-methylguanosine-3'-phosphate
  modified_base 21: mod_base = OTHER; note = 2'-O-methyladenosine-3'-phosphorothioate
  modified_base 22: mod_base = OTHER; note = 2'-O-methyladenosine-3'-phosphorothioate
  modified_base 23: mod_base = OTHER; note = 2'-O-methyluridine-3'-phosphate
  misc_feature 1: note = RNA
  misc_feature 2: note = DNA
  misc_feature 3..4: note = RNA
  misc_feature 5: note = DNA
  misc_feature 6: note = RNA
  misc_feature 7: note = DNA
  misc_feature 8..11: note = RNA
  misc_feature 12: note = DNA
  misc_feature 13..23: note = RNA
aaggaggctgaagacggcagaat

SEQ ID NO: 7517 - DNA, 23 bp, synthetic construct
  source 1..23: mol_type = other DNA
  modified_base 1: mod_base = OTHER; note = 2'-O-methyladenosine-3'-phosphorothioate
  modified_base 2: mod_base = OTHER; note = 2'-deoxythimidine-3'-phosphorothioate
  modified_base 3: mod_base = OTHER; note = 2'-O-methyluridine-3'-phosphate
  modified_base 4: mod_base = OTHER; note = 2'-O-methyluridine-3'-phosphate
  modified_base 6: mod_base = OTHER; note = 2'-O-methyladenosine-3'-phosphate
  modified_base 8: mod_base = OTHER; note = 2'-O-methylguanosine-3'-phosphate
  modified_base 9: mod_base = OTHER; note = 2'-O-methyladenosine-3'-phosphate
  modified_base 10: mod_base = OTHER; note = 2'-O-methylguanosine-3'-phosphate
  modified_base 11: mod_base = OTHER; note = 2'-O-methylguanosine-3'-phosphate
  modified_base 13: mod_base = OTHER; note = 2'-O-methyluridine-3'-phosphate
  modified_base 14: mod_base = OTHER; note = 2'-fluoroguanosine-3'-phosphate
  modified_base 15: mod_base = OTHER; note = 2'-O-methyladenosine-3'-phosphate
  modified_base 16: mod_base = OTHER; note = 2'-O-methyladenosine-3'-phosphate
  modified_base 17: mod_base = OTHER; note = 2'-O-methylguanosine-3'-phosphate
  modified_base 18: mod_base = OTHER; note = 2'-O-methyladenosine-3'-phosphate
  modified_base 19: mod_base = OTHER; note = 2'-O-methylcytidine-3'-phosphate
  modified_base 20: mod_base = OTHER; note = 2'-O-methylguanosine-3'-phosphate
  modified_base 21: mod_base = OTHER; note = 2'-O-methylguanosine-3'-phosphorothioate
  modified_base 22: mod_base = OTHER; note = 2'-O-methylcytidine-3'-phosphorothioate
  modified_base 23: mod_base = OTHER; note = 2'-O-methyladenosine-3'-phosphate
  misc_feature 1: note = RNA
  misc_feature 2: note = DNA
  misc_feature 3..4: note = RNA
  misc_feature 5: note = DNA
  misc_feature 6: note = RNA
  misc_feature 7: note = DNA
  misc_feature 8..11: note = RNA
  misc_feature 12: note = DNA
  misc_feature 13..23: note = RNA
atttgaggaggctgaagacggca

SEQ ID NO: 7518 - DNA, 23 bp, synthetic construct
  source 1..23: mol_type = other DNA
  modified_base 1: mod_base = OTHER; note = 2'-O-methyladenosine-3'-phosphorothioate
  modified_base 2: mod_base = OTHER; note = 2'-deoxycytidine-3'-phosphorothioate
  modified_base 3: mod_base = OTHER; note = 2'-O-methyluridine-3'-phosphate
  modified_base 4: mod_base = OTHER; note = 2'-O-methyluridine-3'-phosphate
  modified_base 6: mod_base = OTHER; note = 2'-O-methylguanosine-3'-phosphate
  modified_base 8: mod_base = OTHER; note = 2'-O-methylguanosine-3'-phosphate
  modified_base 9: mod_base = OTHER; note = 2'-O-methylguanosine-3'-phosphate
  modified_base 10: mod_base = OTHER; note = 2'-O-methyladenosine-3'-phosphate
  modified_base 11: mod_base = OTHER; note = 2'-O-methylguanosine-3'-phosphate
  modified_base 13: mod_base = OTHER; note = 2'-O-methylcytidine-3'-phosphate
  modified_base 14: mod_base = OTHER; note = 2'-fluorouridine-3'-phosphate
  modified_base 15: mod_base = OTHER; note = 2'-O-methylguanosine-3'-phosphate
  modified_base 16: mod_base = OTHER; note = 2'-O-methyladenosine-3'-phosphate
  modified_base 17: mod_base = OTHER; note = 2'-O-methyladenosine-3'-phosphate
  modified_base 18: mod_base = OTHER; note = 2'-O-methylguanosine-3'-phosphate
  modified_base 19: mod_base = OTHER; note = 2'-O-methyladenosine-3'-phosphate
  modified_base 20: mod_base = OTHER; note = 2'-O-methylcytidine-3'-phosphate
  modified_base 21: mod_base = OTHER; note = 2'-O-methylguanosine-3'-phosphorothioate
  modified_base 22: mod_base = OTHER; note = 2'-O-methylguanosine-3'-phosphorothioate
  modified_base 23: mod_base = OTHER; note = 2'-O-methylcytidine-3'-phosphate
  misc_feature 1: note = RNA
  misc_feature 2: note = DNA
  misc_feature 3..4: note = RNA
  misc_feature 5: note = DNA
  misc_feature 6: note = RNA
  misc_feature 7: note = DNA
  misc_feature 8..11: note = RNA
  misc_feature 12: note = DNA
  misc_feature 13..23: note = RNA
actttgaggaggctgaagacggc

SEQ ID NO: 7519 - DNA, 23 bp, synthetic construct
  source 1..23: mol_type = other DNA
  modified_base 1: mod_base = OTHER; note = 2'-O-methyladenosine-3'-phosphorothioate
  modified_base 2: mod_base = OTHER; note = 2'-deoxyguanosine-3'-phosphorothioate
  modified_base 3: mod_base = OTHER; note = 2'-O-methylcytidine-3'-phosphate
  modified_base 4: mod_base = OTHER; note = 2'-O-methyluridine-3'-phosphate
  modified_base 6: mod_base = OTHER; note = 2'-O-methyluridine-3'-phosphate
  modified_base 8: mod_base = OTHER; note = 2'-O-methyladenosine-3'-phosphate
  modified_base 9: mod_base = OTHER; note = 2'-O-methylguanosine-3'-phosphate
  modified_base 10: mod_base = OTHER; note = 2'-O-methylguanosine-3'-phosphate
  modified_base 11: mod_base = OTHER; note = 2'-O-methyladenosine-3'-phosphate
  modified_base 13: mod_base = OTHER; note = 2'-O-methylguanosine-3'-phosphate
  modified_base 14: mod_base = OTHER; note = 2'-fluorocytidine-3'-phosphate
  modified_base 15: mod_base = OTHER; note = 2'-O-methyluridine-3'-phosphate
  modified_base 16: mod_base = OTHER; note = 2'-O-methylguanosine-3'-phosphate
  modified_base 17: mod_base = OTHER; note = 2'-O-methyladenosine-3'-phosphate
  modified_base 18: mod_base = OTHER; note = 2'-O-methyladenosine-3'-phosphate
  modified_base 19: mod_base = OTHER; note = 2'-O-methylguanosine-3'-phosphate
  modified_base 20: mod_base = OTHER; note = 2'-O-methyladenosine-3'-phosphate
  modified_base 21: mod_base = OTHER; note = 2'-O-methylcytidine-3'-phosphorothioate
  modified_base 22: mod_base = OTHER; note = 2'-O-methylguanosine-3'-phosphorothioate
  modified_base 23: mod_base = OTHER; note = 2'-O-methylguanosine-3'-phosphate
  misc_feature 1: note = RNA
  misc_feature 2: note = DNA
  misc_feature 3..4: note = RNA
  misc_feature 5: note = DNA
  misc_feature 6: note = RNA
  misc_feature 7: note = DNA
  misc_feature 8..11: note = RNA
  misc_feature 12: note = DNA
  misc_feature 13..23: note = RNA
agctttgaggaggctgaagacgg

SEQ ID NO: 7520 - DNA, 23 bp, synthetic construct
  source 1..23: mol_type = other DNA
  modified_base 1: mod_base = OTHER; note = 2'-O-methyladenosine-3'-phosphorothioate
  modified_base 2: mod_base = OTHER; note = 2'-deoxyguanosine-3'-phosphorothioate
  modified_base 3: mod_base = OTHER; note = 2'-O-methylguanosine-3'-phosphate
  modified_base 4: mod_base = OTHER; note = 2'-O-methylcytidine-3'-phosphate
  modified_base 6: mod_base = OTHER; note = 2'-O-methyluridine-3'-phosphate
  modified_base 8: mod_base = OTHER; note = 2'-O-methylguanosine-3'-phosphate
  modified_base 9: mod_base = OTHER; note = 2'-O-methyladenosine-3'-phosphate
  modified_base 10: mod_base = OTHER; note = 2'-O-methylguanosine-3'-phosphate
  modified_base 11: mod_base = OTHER; note = 2'-O-methylguanosine-3'-phosphate
  modified_base 13: mod_base = OTHER; note = 2'-O-methylguanosine-3'-phosphate
  modified_base 14: mod_base = OTHER; note = 2'-fluoroguanosine-3'-phosphate
  modified_base 15: mod_base = OTHER; note = 2'-O-methylcytidine-3'-phosphate
  modified_base 16: mod_base = OTHER; note = 2'-O-methyluridine-3'-phosphate
  modified_base 17: mod_base = OTHER; note = 2'-O-methylguanosine-3'-phosphate
  modified_base 18: mod_base = OTHER; note = 2'-O-methyladenosine-3'-phosphate
  modified_base 19: mod_base = OTHER; note = 2'-O-methyladenosine-3'-phosphate
  modified_base 20: mod_base = OTHER; note = 2'-O-methylguanosine-3'-phosphate
  modified_base 21: mod_base = OTHER; note = 2'-O-methyladenosine-3'-phosphorothioate
  modified_base 22: mod_base = OTHER; note = 2'-O-methylcytidine-3'-phosphorothioate
  modified_base 23: mod_base = OTHER; note = 2'-O-methylguanosine-3'-phosphate
  misc_feature 1: note = RNA
  misc_feature 2: note = DNA
  misc_feature 3..4: note = RNA
  misc_feature 5: note = DNA
  misc_feature 6: note = RNA
  misc_feature 7: note = DNA
  misc_feature 8..11: note = RNA
  misc_feature 12: note = DNA
  misc_feature 13..23: note = RNA
aggctttgaggaggctgaagacg

SEQ ID NO: 7521 - DNA, 23 bp, synthetic construct
  source 1..23: mol_type = other DNA
  modified_base 1: mod_base = OTHER; note = 2'-O-methyladenosine-3'-phosphorothioate
  modified_base 2: mod_base = OTHER; note = 2'-deoxythimidine-3'-phosphorothioate
  modified_base 3: mod_base = OTHER; note = 2'-O-methylguanosine-3'-phosphate
  modified_base 4: mod_base = OTHER; note = 2'-O-methylguanosine-3'-phosphate
  modified_base 6: mod_base = OTHER; note = 2'-O-methyluridine-3'-phosphate
  modified_base 8: mod_base = OTHER; note = 2'-O-methyluridine-3'-phosphate
  modified_base 9: mod_base = OTHER; note = 2'-O-methylguanosine-3'-phosphate
  modified_base 10: mod_base = OTHER; note = 2'-O-methyladenosine-3'-phosphate
  modified_base 11: mod_base = OTHER; note = 2'-O-methylguanosine-3'-phosphate
  modified_base 13: mod_base = OTHER; note = 2'-O-methyladenosine-3'-phosphate
  modified_base 14: mod_base = OTHER; note = 2'-fluoroguanosine-3'-phosphate
  modified_base 15: mod_base = OTHER; note = 2'-O-methylguanosine-3'-phosphate
  modified_base 16: mod_base = OTHER; note = 2'-O-methylcytidine-3'-phosphate
  modified_base 17: mod_base = OTHER; note = 2'-O-methyluridine-3'-phosphate
  modified_base 18: mod_base = OTHER; note = 2'-O-methylguanosine-3'-phosphate
  modified_base 19: mod_base = OTHER; note = 2'-O-methyladenosine-3'-phosphate
  modified_base 20: mod_base = OTHER; note = 2'-O-methyladenosine-3'-phosphate
  modified_base 21: mod_base = OTHER; note = 2'-O-methylguanosine-3'-phosphorothioate
  modified_base 22: mod_base = OTHER; note = 2'-O-methyladenosine-3'-phosphorothioate
  modified_base 23: mod_base = OTHER; note = 2'-O-methylcytidine-3'-phosphate
  misc_feature 1: note = RNA
  misc_feature 2: note = DNA
  misc_feature 3..4: note = RNA
  misc_feature 5: note = DNA
  misc_feature 6: note = RNA
  misc_feature 7: note = DNA
  misc_feature 8..11: note = RNA
  misc_feature 12: note = DNA
  misc_feature 13..23: note = RNA
atggctttgaggaggctgaagac

SEQ ID NO: 7522 - DNA, 23 bp, synthetic construct
  source 1..23: mol_type = other DNA
  modified_base 1: mod_base = OTHER; note = 2'-O-methyladenosine-3'-phosphorothioate
  modified_base 2: mod_base = OTHER; note = 2'-deoxyguanosine-3'-phosphorothioate
  modified_base 3: mod_base = OTHER; note = 2'-O-methyluridine-3'-phosphate
  modified_base 4: mod_base = OTHER; note = 2'-O-methyluridine-3'-phosphate
  modified_base 6: mod_base = OTHER; note = 2'-O-methylguanosine-3'-phosphate
  modified_base 8: mod_base = OTHER; note = 2'-O-methyluridine-3'-phosphate
  modified_base 9: mod_base = OTHER; note = 2'-O-methyluridine-3'-phosphate
  modified_base 10: mod_base = OTHER; note = 2'-O-methyluridine-3'-phosphate
  modified_base 11: mod_base = OTHER; note = 2'-O-methylguanosine-3'-phosphate
  modified_base 13: mod_base = OTHER; note = 2'-O-methylguanosine-3'-phosphate
  modified_base 14: mod_base = OTHER; note = 2'-fluoroguanosine-3'-phosphate
  modified_base 15: mod_base = OTHER; note = 2'-O-methyladenosine-3'-phosphate
  modified_base 16: mod_base = OTHER; note = 2'-O-methylguanosine-3'-phosphate
  modified_base 17: mod_base = OTHER; note = 2'-O-methylguanosine-3'-phosphate
  modified_base 18: mod_base = OTHER; note = 2'-O-methylcytidine-3'-phosphate
  modified_base 19: mod_base = OTHER; note = 2'-O-methyluridine-3'-phosphate
  modified_base 20: mod_base = OTHER; note = 2'-O-methylguanosine-3'-phosphate
  modified_base 21: mod_base = OTHER; note = 2'-O-methyladenosine-3'-phosphorothioate
  modified_base 22: mod_base = OTHER; note = 2'-O-methyladenosine-3'-phosphorothioate
  modified_base 23: mod_base = OTHER; note = 2'-O-methylguanosine-3'-phosphate
  misc_feature 1: note = RNA
  misc_feature 2: note = DNA
  misc_feature 3..4: note = RNA
  misc_feature 5: note = DNA
  misc_feature 6: note = RNA
  misc_feature 7: note = DNA
  misc_feature 8..11: note = RNA
  misc_feature 12: note = DNA
  misc_feature 13..23: note = RNA
agttggctttgaggaggctgaag

SEQ ID NO: 7523 - DNA, 23 bp, synthetic construct
  source 1..23: mol_type = other DNA
  modified_base 1: mod_base = OTHER; note = 2'-O-methyladenosine-3'-phosphorothioate
  modified_base 2: mod_base = OTHER; note = 2'-deoxythimidine-3'-phosphorothioate
  modified_base 3: mod_base = OTHER; note = 2'-O-methylguanosine-3'-phosphate
  modified_base 4: mod_base = OTHER; note = 2'-O-methyluridine-3'-phosphate
  modified_base 6: mod_base = OTHER; note = 2'-O-methylguanosine-3'-phosphate
  modified_base 8: mod_base = OTHER; note = 2'-O-methylcytidine-3'-phosphate
  modified_base 9: mod_base = OTHER; note = 2'-O-methyluridine-3'-phosphate
  modified_base 10: mod_base = OTHER; note = 2'-O-methyluridine-3'-phosphate
  modified_base 11: mod_base = OTHER; note = 2'-O-methyluridine-3'-phosphate
  modified_base 13: mod_base = OTHER; note = 2'-O-methyladenosine-3'-phosphate
  modified_base 14: mod_base = OTHER; note = 2'-fluoroguanosine-3'-phosphate
  modified_base 15: mod_base = OTHER; note = 2'-O-methylguanosine-3'-phosphate
  modified_base 16: mod_base = OTHER; note = 2'-O-methyladenosine-3'-phosphate
  modified_base 17: mod_base = OTHER; note = 2'-O-methylguanosine-3'-phosphate
  modified_base 18: mod_base = OTHER; note = 2'-O-methylguanosine-3'-phosphate
  modified_base 19: mod_base = OTHER; note = 2'-O-methylcytidine-3'-phosphate
  modified_base 20: mod_base = OTHER; note = 2'-O-methyluridine-3'-phosphate
  modified_base 21: mod_base = OTHER; note = 2'-O-methylguanosine-3'-phosphorothioate
  modified_base 22: mod_base = OTHER; note = 2'-O-methyladenosine-3'-phosphorothioate
  modified_base 23: mod_base = OTHER; note = 2'-O-methyladenosine-3'-phosphate
  misc_feature 1: note = RNA
  misc_feature 2: note = DNA
  misc_feature 3..4: note = RNA
  misc_feature 5: note = DNA
  misc_feature 6: note = RNA
  misc_feature 7: note = DNA
  misc_feature 8..11: note = RNA
  misc_feature 12: note = DNA
  misc_feature 13..23: note = RNA
atgttggctttgaggaggctgaa

SEQ ID NO: 7524 - DNA, 23 bp, synthetic construct
  source 1..23: mol_type = other DNA
  modified_base 1: mod_base = OTHER; note = 2'-O-methyladenosine-3'-phosphorothioate
  modified_base 2: mod_base = OTHER; note = 2'-deoxythimidine-3'-phosphorothioate
  modified_base 3: mod_base = OTHER; note = 2'-O-methyluridine-3'-phosphate
  modified_base 4: mod_base = OTHER; note = 2'-O-methylguanosine-3'-phosphate
  modified_base 6: mod_base = OTHER; note = 2'-O-methyluridine-3'-phosphate
  modified_base 8: mod_base = OTHER; note = 2'-O-methylguanosine-3'-phosphate
  modified_base 9: mod_base = OTHER; note = 2'-O-methylcytidine-3'-phosphate
  modified_base 10: mod_base = OTHER; note = 2'-O-methyluridine-3'-phosphate
  modified_base 11: mod_base = OTHER; note = 2'-O-methyluridine-3'-phosphate
  modified_base 13: mod_base = OTHER; note = 2'-O-methylguanosine-3'-phosphate
  modified_base 14: mod_base = OTHER; note = 2'-fluoroadenosine-3'-phosphate
  modified_base 15: mod_base = OTHER; note = 2'-O-methylguanosine-3'-phosphate
  modified_base 16: mod_base = OTHER; note = 2'-O-methylguanosine-3'-phosphate
  modified_base 17: mod_base = OTHER; note = 2'-O-methyladenosine-3'-phosphate
  modified_base 18: mod_base = OTHER; note = 2'-O-methylguanosine-3'-phosphate
  modified_base 19: mod_base = OTHER; note = 2'-O-methylguanosine-3'-phosphate
  modified_base 20: mod_base = OTHER; note = 2'-O-methylcytidine-3'-phosphate
  modified_base 21: mod_base = OTHER; note = 2'-O-methyluridine-3'-phosphorothioate
  modified_base 22: mod_base = OTHER; note = 2'-O-methylguanosine-3'-phosphorothioate
  modified_base 23: mod_base = OTHER; note = 2'-O-methyladenosine-3'-phosphate
  misc_feature 1: note = RNA
  misc_feature 2: note = DNA
  misc_feature 3..4: note = RNA
  misc_feature 5: note = DNA
  misc_feature 6: note = RNA
  misc_feature 7: note = DNA
  misc_feature 8..11: note = RNA
  misc_feature 12: note = DNA
  misc_feature 13..23: note = RNA
attgttggctttgaggaggctga

SEQ ID NO: 7525 - DNA, 23 bp, synthetic construct
  source 1..23: mol_type = other DNA
  modified_base 1: mod_base = OTHER; note = 2'-O-methyladenosine-3'-phosphorothioate
  modified_base 2: mod_base = OTHER; note = 2'-deoxyadenosine-3'-phosphorothioate
  modified_base 3: mod_base = OTHER; note = 2'-O-methyluridine-3'-phosphate
  modified_base 4: mod_base = OTHER; note = 2'-O-methyluridine-3'-phosphate
  modified_base 6: mod_base = OTHER; note = 2'-O-methyluridine-3'-phosphate
  modified_base 8: mod_base = OTHER; note = 2'-O-methylguanosine-3'-phosphate
  modified_base 9: mod_base = OTHER; note = 2'-O-methylguanosine-3'-phosphate
  modified_base 10: mod_base = OTHER; note = 2'-O-methylcytidine-3'-phosphate
  modified_base 11: mod_base = OTHER; note = 2'-O-methyluridine-3'-phosphate
  modified_base 13: mod_base = OTHER; note = 2'-O-methyluridine-3'-phosphate
  modified_base 14: mod_base = OTHER; note = 2'-fluoroguanosine-3'-phosphate
  modified_base 15: mod_base = OTHER; note = 2'-O-methyladenosine-3'-phosphate
  modified_base 16: mod_base = OTHER; note = 2'-O-methylguanosine-3'-phosphate
  modified_base 17: mod_base = OTHER; note = 2'-O-methylguanosine-3'-phosphate
  modified_base 18: mod_base = OTHER; note = 2'-O-methyladenosine-3'-phosphate
  modified_base 19: mod_base = OTHER; note = 2'-O-methylguanosine-3'-phosphate
  modified_base 20: mod_base = OTHER; note = 2'-O-methylguanosine-3'-phosphate
  modified_base 21: mod_base = OTHER; note = 2'-O-methylcytidine-3'-phosphorothioate
  modified_base 22: mod_base = OTHER; note = 2'-O-methyluridine-3'-phosphorothioate
  modified_base 23: mod_base = OTHER; note = 2'-O-methylguanosine-3'-phosphate
  misc_feature 1: note = RNA
  misc_feature 2: note = DNA
  misc_feature 3..4: note = RNA
  misc_feature 5: note = DNA
  misc_feature 6: note = RNA
  misc_feature 7: note = DNA
  misc_feature 8..11: note = RNA
  misc_feature 12: note = DNA
  misc_feature 13..23: note = RNA
aattgttggctttgaggaggctg

SEQ ID NO: 7526 - DNA, 23 bp, synthetic construct
  source 1..23: mol_type = other DNA
  modified_base 1: mod_base = OTHER; note = 2'-O-methyladenosine-3'-phosphorothioate
  modified_base 2: mod_base = OTHER; note = 2'-deoxyguanosine-3'-phosphorothioate
  modified_base 3: mod_base = OTHER; note = 2'-O-methyladenosine-3'-phosphate
  modified_base 4: mod_base = OTHER; note = 2'-O-methyluridine-3'-phosphate
  modified_base 6: mod_base = OTHER; note = 2'-O-methylguanosine-3'-phosphate
  modified_base 8: mod_base = OTHER; note = 2'-O-methyluridine-3'-phosphate
  modified_base 9: mod_base = OTHER; note = 2'-O-methylguanosine-3'-phosphate
  modified_base 10: mod_base = OTHER; note = 2'-O-methylguanosine-3'-phosphate
  modified_base 11: mod_base = OTHER; note = 2'-O-methylcytidine-3'-phosphate
  modified_base 13: mod_base = OTHER; note = 2'-O-methyluridine-3'-phosphate
  modified_base 14: mod_base = OTHER; note = 2'-fluorouridine-3'-phosphate
  modified_base 15: mod_base = OTHER; note = 2'-O-methylguanosine-3'-phosphate
  modified_base 16: mod_base = OTHER; note = 2'-O-methyladenosine-3'-phosphate
  modified_base 17: mod_base = OTHER; note = 2'-O-methylguanosine-3'-phosphate
  modified_base 18: mod_base = OTHER; note = 2'-O-methylguanosine-3'-phosphate
  modified_base 19: mod_base = OTHER; note = 2'-O-methyladenosine-3'-phosphate
  modified_base 20: mod_base = OTHER; note = 2'-O-methylguanosine-3'-phosphate
  modified_base 21: mod_base = OTHER; note = 2'-O-methylguanosine-3'-phosphorothioate
  modified_base 22: mod_base = OTHER; note = 2'-O-methylcytidine-3'-phosphorothioate
  modified_base 23: mod_base = OTHER; note = 2'-O-methyluridine-3'-phosphate
  misc_feature 1: note = RNA
  misc_feature 2: note = DNA
  misc_feature 3..4: note = RNA
  misc_feature 5: note = DNA
  misc_feature 6: note = RNA
  misc_feature 7: note = DNA
  misc_feature 8..11: note = RNA
  misc_feature 12: note = DNA
  misc_feature 13..23: note = RNA
agattgttggctttgaggaggct

SEQ ID NO: 7527 - DNA, 23 bp, synthetic construct
  source 1..23: mol_type = other DNA
  modified_base 1: mod_base = OTHER; note = 2'-O-methyladenosine-3'-phosphorothioate
  modified_base 2: mod_base = OTHER; note = 2'-deoxyguanosine-3'-phosphorothioate
  modified_base 3: mod_base = OTHER; note = 2'-O-methylguanosine-3'-phosphate
  modified_base 4: mod_base = OTHER; note = 2'-O-methyladenosine-3'-phosphate
  modified_base 6: mod_base = OTHER; note = 2'-O-methyluridine-3'-phosphate
  modified_base 8: mod_base = OTHER; note = 2'-O-methyluridine-3'-phosphate
  modified_base 9: mod_base = OTHER; note = 2'-O-methyluridine-3'-phosphate
  modified_base 10: mod_base = OTHER; note = 2'-O-methylguanosine-3'-phosphate
  modified_base 11: mod_base = OTHER; note = 2'-O-methylguanosine-3'-phosphate
  modified_base 13: mod_base = OTHER; note = 2'-O-methyluridine-3'-phosphate
  modified_base 14: mod_base = OTHER; note = 2'-fluorouridine-3'-phosphate
  modified_base 15: mod_base = OTHER; note = 2'-O-methyluridine-3'-phosphate
  modified_base 16: mod_base = OTHER; note = 2'-O-methylguanosine-3'-phosphate
  modified_base 17: mod_base = OTHER; note = 2'-O-methyladenosine-3'-phosphate
  modified_base 18: mod_base = OTHER; note = 2'-O-methylguanosine-3'-phosphate
  modified_base 19: mod_base = OTHER; note = 2'-O-methylguanosine-3'-phosphate
  modified_base 20: mod_base = OTHER; note = 2'-O-methyladenosine-3'-phosphate
  modified_base 21: mod_base = OTHER; note = 2'-O-methylguanosine-3'-phosphorothioate
  modified_base 22: mod_base = OTHER; note = 2'-O-methylguanosine-3'-phosphorothioate
  modified_base 23: mod_base = OTHER; note = 2'-O-methylcytidine-3'-phosphate
  misc_feature 1: note = RNA
  misc_feature 2: note = DNA
  misc_feature 3..4: note = RNA
  misc_feature 5: note = DNA
  misc_feature 6: note = RNA
  misc_feature 7: note = DNA
  misc_feature 8..11: note = RNA
  misc_feature 12: note = DNA
  misc_feature 13..23: note = RNA
aggattgttggctttgaggaggc

SEQ ID NO: 7528 - DNA, 23 bp, synthetic construct
  source 1..23: mol_type = other DNA
  modified_base 1: mod_base = OTHER; note = 2'-O-methyladenosine-3'-phosphorothioate
  modified_base 2: mod_base = OTHER; note = 2'-deoxyadenosine-3'-phosphorothioate
  modified_base 3: mod_base = OTHER; note = 2'-O-methylguanosine-3'-phosphate
  modified_base 4: mod_base = OTHER; note = 2'-O-methylguanosine-3'-phosphate
  modified_base 6: mod_base = OTHER; note = 2'-O-methyluridine-3'-phosphate
  modified_base 8: mod_base = OTHER; note = 2'-O-methylguanosine-3'-phosphate
  modified_base 9: mod_base = OTHER; note = 2'-O-methyluridine-3'-phosphate
  modified_base 10: mod_base = OTHER; note = 2'-O-methyluridine-3'-phosphate
  modified_base 11: mod_base = OTHER; note = 2'-O-methylguanosine-3'-phosphate
  modified_base 13: mod_base = OTHER; note = 2'-O-methylcytidine-3'-phosphate
  modified_base 14: mod_base = OTHER; note = 2'-fluorouridine-3'-phosphate
  modified_base 15: mod_base = OTHER; note = 2'-O-methyluridine-3'-phosphate
  modified_base 16: mod_base = OTHER; note = 2'-O-methyluridine-3'-phosphate
  modified_base 17: mod_base = OTHER; note = 2'-O-methylguanosine-3'-phosphate
  modified_base 18: mod_base = OTHER; note = 2'-O-methyladenosine-3'-phosphate
  modified_base 19: mod_base = OTHER; note = 2'-O-methylguanosine-3'-phosphate
  modified_base 20: mod_base = OTHER; note = 2'-O-methylguanosine-3'-phosphate
  modified_base 21: mod_base = OTHER; note = 2'-O-methyladenosine-3'-phosphorothioate
  modified_base 22: mod_base = OTHER; note = 2'-O-methylguanosine-3'-phosphorothioate
  modified_base 23: mod_base = OTHER; note = 2'-O-methylguanosine-3'-phosphate
  misc_feature 1: note = RNA
  misc_feature 2: note = DNA
  misc_feature 3..4: note = RNA
  misc_feature 5: note = DNA
  misc_feature 6: note = RNA
  misc_feature 7: note = DNA
  misc_feature 8..11: note = RNA
  misc_feature 12: note = DNA
  misc_feature 13..23: note = RNA
aaggattgttggctttgaggagg

SEQ ID NO: 7529 - DNA, 23 bp, synthetic construct
  source 1..23: mol_type = other DNA
  modified_base 1: mod_base = OTHER; note = 2'-O-methyladenosine-3'-phosphorothioate
  modified_base 2: mod_base = OTHER; note = 2'-deoxyadenosine-3'-phosphorothioate
  modified_base 3: mod_base = OTHER; note = 2'-O-methyladenosine-3'-phosphate
  modified_base 4: mod_base = OTHER; note = 2'-O-methylguanosine-3'-phosphate
  modified_base 6: mod_base = OTHER; note = 2'-O-methyladenosine-3'-phosphate
  modified_base 8: mod_base = OTHER; note = 2'-O-methyluridine-3'-phosphate
  modified_base 9: mod_base = OTHER; note = 2'-O-methylguanosine-3'-phosphate
  modified_base 10: mod_base = OTHER; note = 2'-O-methyluridine-3'-phosphate
  modified_base 11: mod_base = OTHER; note = 2'-O-methyluridine-3'-phosphate
  modified_base 13: mod_base = OTHER; note = 2'-O-methylguanosine-3'-phosphate
  modified_base 14: mod_base = OTHER; note = 2'-fluorocytidine-3'-phosphate
  modified_base 15: mod_base = OTHER; note = 2'-O-methyluridine-3'-phosphate
  modified_base 16: mod_base = OTHER; note = 2'-O-methyluridine-3'-phosphate
  modified_base 17: mod_base = OTHER; note = 2'-O-methyluridine-3'-phosphate
  modified_base 18: mod_base = OTHER; note = 2'-O-methylguanosine-3'-phosphate
  modified_base 19: mod_base = OTHER; note = 2'-O-methyladenosine-3'-phosphate
  modified_base 20: mod_base = OTHER; note = 2'-O-methylguanosine-3'-phosphate
  modified_base 21: mod_base = OTHER; note = 2'-O-methylguanosine-3'-phosphorothioate
  modified_base 22: mod_base = OTHER; note = 2'-O-methyladenosine-3'-phosphorothioate
  modified_base 23: mod_base = OTHER; note = 2'-O-methylguanosine-3'-phosphate
  misc_feature 1: note = RNA
  misc_feature 2: note = DNA
  misc_feature 3..4: note = RNA
  misc_feature 5: note = DNA
  misc_feature 6: note = RNA
  misc_feature 7: note = DNA
  misc_feature 8..11: note = RNA
  misc_feature 12: note = DNA
  misc_feature 13..23: note = RNA
aaaggattgttggctttgaggag

SEQ ID NO: 7530 - DNA, 23 bp, synthetic construct
  source 1..23: mol_type = other DNA
  modified_base 1: mod_base = OTHER; note = 2'-O-methyladenosine-3'-phosphorothioate
  modified_base 2: mod_base = OTHER; note = 2'-deoxycytidine-3'-phosphorothioate
  modified_base 3: mod_base = OTHER; note = 2'-O-methyladenosine-3'-phosphate
  modified_base 4: mod_base = OTHER; note = 2'-O-methyladenosine-3'-phosphate
  modified_base 6: mod_base = OTHER; note = 2'-O-methylguanosine-3'-phosphate
  modified_base 8: mod_base = OTHER; note = 2'-O-methyluridine-3'-phosphate
  modified_base 9: mod_base = OTHER; note = 2'-O-methyluridine-3'-phosphate
  modified_base 10: mod_base = OTHER; note = 2'-O-methylguanosine-3'-phosphate
  modified_base 11: mod_base = OTHER; note = 2'-O-methyluridine-3'-phosphate
  modified_base 13: mod_base = OTHER; note = 2'-O-methylguanosine-3'-phosphate
  modified_base 14: mod_base = OTHER; note = 2'-fluoroguanosine-3'-phosphate
  modified_base 15: mod_base = OTHER; note = 2'-O-methylcytidine-3'-phosphate
  modified_base 16: mod_base = OTHER; note = 2'-O-methyluridine-3'-phosphate
  modified_base 17: mod_base = OTHER; note = 2'-O-methyluridine-3'-phosphate
  modified_base 18: mod_base = OTHER; note = 2'-O-methyluridine-3'-phosphate
  modified_base 19: mod_base = OTHER; note = 2'-O-methylguanosine-3'-phosphate
  modified_base 20: mod_base = OTHER; note = 2'-O-methyladenosine-3'-phosphate
  modified_base 21: mod_base = OTHER; note = 2'-O-methylguanosine-3'-phosphorothioate
  modified_base 22: mod_base = OTHER; note = 2'-O-methylguanosine-3'-phosphorothioate
  modified_base 23: mod_base = OTHER; note = 2'-O-methyladenosine-3'-phosphate
  misc_feature 1: note = RNA
  misc_feature 2: note = DNA
  misc_feature 3..4: note = RNA
  misc_feature 5: note = DNA
  misc_feature 6: note = RNA
  misc_feature 7: note = DNA
  misc_feature 8..11: note = RNA
  misc_feature 12: note = DNA
  misc_feature 13..23: note = RNA
acaaggattgttggctttgagga

SEQ ID NO: 7531 - DNA, 23 bp, synthetic construct
  source 1..23: mol_type = other DNA
  modified_base 1: mod_base = OTHER; note = 2'-O-methyladenosine-3'-phosphorothioate
  modified_base 2: mod_base = OTHER; note = 2'-deoxyadenosine-3'-phosphorothioate
  modified_base 3: mod_base = OTHER; note = 2'-O-methylguanosine-3'-phosphate
  modified_base 4: mod_base = OTHER; note = 2'-O-methylguanosine-3'-phosphate
  modified_base 6: mod_base = OTHER; note = 2'-O-methylcytidine-3'-phosphate
  modified_base 8: mod_base = OTHER; note = 2'-O-methyladenosine-3'-phosphate
  modified_base 9: mod_base = OTHER; note = 2'-O-methylguanosine-3'-phosphate
  modified_base 10: mod_base = OTHER; note = 2'-O-methylguanosine-3'-phosphate
  modified_base 11: mod_base = OTHER; note = 2'-O-methyladenosine-3'-phosphate
  modified_base 13: mod_base = OTHER; note = 2'-O-methyluridine-3'-phosphate
  modified_base 14: mod_base = OTHER; note = 2'-fluoroguanosine-3'-phosphate
  modified_base 15: mod_base = OTHER; note = 2'-O-methyluridine-3'-phosphate
  modified_base 16: mod_base = OTHER; note = 2'-O-methyluridine-3'-phosphate
  modified_base 17: mod_base = OTHER; note = 2'-O-methylguanosine-3'-phosphate
  modified_base 18: mod_base = OTHER; note = 2'-O-methylguanosine-3'-phosphate
  modified_base 19: mod_base = OTHER; note = 2'-O-methylcytidine-3'-phosphate
  modified_base 20: mod_base = OTHER; note = 2'-O-methyluridine-3'-phosphate
  modified_base 21: mod_base = OTHER; note = 2'-O-methyluridine-3'-phosphorothioate
  modified_base 22: mod_base = OTHER; note = 2'-O-methyluridine-3'-phosphorothioate
  modified_base 23: mod_base = OTHER; note = 2'-O-methylguanosine-3'-phosphate
  misc_feature 1: note = RNA
  misc_feature 2: note = DNA
  misc_feature 3..4: note = RNA
  misc_feature 5: note = DNA
  misc_feature 6: note = RNA
  misc_feature 7: note = DNA
  misc_feature 8..11: note = RNA
  misc_feature 12: note = DNA
  misc_feature 13..23: note = RNA
aaggccaaggattgttggctttg

SEQ ID NO: 7532 - DNA, 23 bp, synthetic construct
  source 1..23: mol_type = other DNA
  modified_base 1: mod_base = OTHER; note = 2'-O-methyladenosine-3'-phosphorothioate
  modified_base 2: mod_base = OTHER; note = 2'-deoxycytidine-3'-phosphorothioate
  modified_base 3: mod_base = OTHER; note = 2'-O-methyladenosine-3'-phosphate
  modified_base 4: mod_base = OTHER; note = 2'-O-methylguanosine-3'-phosphate
  modified_base 6: mod_base = OTHER; note = 2'-O-methylcytidine-3'-phosphate
  modified_base 8: mod_base = OTHER; note = 2'-O-methyladenosine-3'-phosphate
  modified_base 9: mod_base = OTHER; note = 2'-O-methyladenosine-3'-phosphate
  modified_base 10: mod_base = OTHER; note = 2'-O-methylguanosine-3'-phosphate
  modified_base 11: mod_base = OTHER; note = 2'-O-methylguanosine-3'-phosphate
  modified_base 13: mod_base = OTHER; note = 2'-O-methyluridine-3'-phosphate
  modified_base 14: mod_base = OTHER; note = 2'-fluorouridine-3'-phosphate
  modified_base 15: mod_base = OTHER; note = 2'-O-methylguanosine-3'-phosphate
  modified_base 16: mod_base = OTHER; note = 2'-O-methyluridine-3'-phosphate
  modified_base 17: mod_base = OTHER; note = 2'-O-methyluridine-3'-phosphate
  modified_base 18: mod_base = OTHER; note = 2'-O-methylguanosine-3'-phosphate
  modified_base 19: mod_base = OTHER; note = 2'-O-methylguanosine-3'-phosphate
  modified_base 20: mod_base = OTHER; note = 2'-O-methylcytidine-3'-phosphate
  modified_base 21: mod_base = OTHER; note = 2'-O-methyluridine-3'-phosphorothioate
  modified_base 22: mod_base = OTHER; note = 2'-O-methyluridine-3'-phosphorothioate
  modified_base 23: mod_base = OTHER; note = 2'-O-methyluridine-3'-phosphate
  misc_feature 1: note = RNA
  misc_feature 2: note = DNA
  misc_feature 3..4: note = RNA
  misc_feature 5: note = DNA
  misc_feature 6: note = RNA
  misc_feature 7: note = DNA
  misc_feature 8..11: note = RNA
  misc_feature 12: note = DNA
  misc_feature 13..23: note = RNA
acaggccaaggattgttggcttt

SEQ ID NO: 7533 - DNA, 23 bp, synthetic construct
  source 1..23: mol_type = other DNA
  modified_base 1: mod_base = OTHER; note = 2'-O-methyladenosine-3'-phosphorothioate
  modified_base 2: mod_base = OTHER; note = 2'-deoxyguanosine-3'-phosphorothioate
  modified_base 3: mod_base = OTHER; note = 2'-O-methylcytidine-3'-phosphate
  modified_base 4: mod_base = OTHER; note = 2'-O-methyladenosine-3'-phosphate
  modified_base 6: mod_base = OTHER; note = 2'-O-methylguanosine-3'-phosphate
  modified_base 8: mod_base = OTHER; note = 2'-O-methylcytidine-3'-phosphate
  modified_base 9: mod_base = OTHER; note = 2'-O-methyladenosine-3'-phosphate
  modified_base 10: mod_base = OTHER; note = 2'-O-methyladenosine-3'-phosphate
  modified_base 11: mod_base = OTHER; note = 2'-O-methylguanosine-3'-phosphate
  modified_base 13: mod_base = OTHER; note = 2'-O-methyladenosine-3'-phosphate
  modified_base 14: mod_base = OTHER; note = 2'-fluorouridine-3'-phosphate
  modified_base 15: mod_base = OTHER; note = 2'-O-methyluridine-3'-phosphate
  modified_base 16: mod_base = OTHER; note = 2'-O-methylguanosine-3'-phosphate
  modified_base 17: mod_base = OTHER; note = 2'-O-methyluridine-3'-phosphate
  modified_base 18: mod_base = OTHER; note = 2'-O-methyluridine-3'-phosphate
  modified_base 19: mod_base = OTHER; note = 2'-O-methylguanosine-3'-phosphate
  modified_base 20: mod_base = OTHER; note = 2'-O-methylguanosine-3'-phosphate
  modified_base 21: mod_base = OTHER; note = 2'-O-methylcytidine-3'-phosphorothioate
  modified_base 22: mod_base = OTHER; note = 2'-O-methyluridine-3'-phosphorothioate
  modified_base 23: mod_base = OTHER; note = 2'-O-methyluridine-3'-phosphate
  misc_feature 1: note = RNA
  misc_feature 2: note = DNA
  misc_feature 3..4: note = RNA
  misc_feature 5: note = DNA
  misc_feature 6: note = RNA
  misc_feature 7: note = DNA
  misc_feature 8..11: note = RNA
  misc_feature 12: note = DNA
  misc_feature 13..23: note = RNA
agcaggccaaggattgttggctt

SEQ ID NO: 7534 - DNA, 23 bp, synthetic construct
  source 1..23: mol_type = other DNA
  modified_base 1: mod_base = OTHER; note = 2'-O-methyladenosine-3'-phosphorothioate
  modified_base 2: mod_base = OTHER; note = 2'-deoxyguanosine-3'-phosphorothioate
  modified_base 3: mod_base = OTHER; note = 2'-O-methylguanosine-3'-phosphate
  modified_base 4: mod_base = OTHER; note = 2'-O-methylcytidine-3'-phosphate
  modified_base 6: mod_base = OTHER; note = 2'-O-methylguanosine-3'-phosphate
  modified_base 8: mod_base = OTHER; note = 2'-O-methylcytidine-3'-phosphate
  modified_base 9: mod_base = OTHER; note = 2'-O-methylcytidine-3'-phosphate
  modified_base 10: mod_base = OTHER; note = 2'-O-methyladenosine-3'-phosphate
  modified_base 11: mod_base = OTHER; note = 2'-O-methyladenosine-3'-phosphate
  modified_base 13: mod_base = OTHER; note = 2'-O-methylguanosine-3'-phosphate
  modified_base 14: mod_base = OTHER; note = 2'-fluoroadenosine-3'-phosphate
  modified_base 15: mod_base = OTHER; note = 2'-O-methyluridine-3'-phosphate
  modified_base 16: mod_base = OTHER; note = 2'-O-methyluridine-3'-phosphate
  modified_base 17: mod_base = OTHER; note = 2'-O-methylguanosine-3'-phosphate
  modified_base 18: mod_base = OTHER; note = 2'-O-methyluridine-3'-phosphate
  modified_base 19: mod_base = OTHER; note = 2'-O-methyluridine-3'-phosphate
  modified_base 20: mod_base = OTHER; note = 2'-O-methylguanosine-3'-phosphate
  modified_base 21: mod_base = OTHER; note = 2'-O-methylguanosine-3'-phosphorothioate
  modified_base 22: mod_base = OTHER; note = 2'-O-methylcytidine-3'-phosphorothioate
  modified_base 23: mod_base = OTHER; note = 2'-O-methyluridine-3'-phosphate
  misc_feature 1: note = RNA
  misc_feature 2: note = DNA
  misc_feature 3..4: note = RNA
  misc_feature 5: note = DNA
  misc_feature 6: note = RNA
  misc_feature 7: note = DNA
  misc_feature 8..11: note = RNA
  misc_feature 12: note = DNA
  misc_feature 13..23: note = RNA
aggcaggccaaggattgttggct

SEQ ID NO: 7535 - DNA, 23 bp, synthetic construct
  source 1..23: mol_type = other DNA
  modified_base 1: mod_base = OTHER; note = 2'-O-methyladenosine-3'-phosphorothioate
  modified_base 2: mod_base = OTHER; note = 2'-deoxycytidine-3'-phosphorothioate
  modified_base 3: mod_base = OTHER; note = 2'-O-methyluridine-3'-phosphate
  modified_base 4: mod_base = OTHER; note = 2'-O-methylguanosine-3'-phosphate
  modified_base 6: mod_base = OTHER; note = 2'-O-methylcytidine-3'-phosphate
  modified_base 8: mod_base = OTHER; note = 2'-O-methylguanosine-3'-phosphate
  modified_base 9: mod_base = OTHER; note = 2'-O-methylguanosine-3'-phosphate
  modified_base 10: mod_base = OTHER; note = 2'-O-methylcytidine-3'-phosphate
  modified_base 11: mod_base = OTHER; note = 2'-O-methylcytidine-3'-phosphate
  modified_base 13: mod_base = OTHER; note = 2'-O-methyladenosine-3'-phosphate
  modified_base 14: mod_base = OTHER; note = 2'-fluoroguanosine-3'-phosphate
  modified_base 15: mod_base = OTHER; note = 2'-O-methylguanosine-3'-phosphate
  modified_base 16: mod_base = OTHER; note = 2'-O-methyladenosine-3'-phosphate
  modified_base 17: mod_base = OTHER; note = 2'-O-methyluridine-3'-phosphate
  modified_base 18: mod_base = OTHER; note = 2'-O-methyluridine-3'-phosphate
  modified_base 19: mod_base = OTHER; note = 2'-O-methylguanosine-3'-phosphate
  modified_base 20: mod_base = OTHER; note = 2'-O-methyluridine-3'-phosphate
  modified_base 21: mod_base = OTHER; note = 2'-O-methyluridine-3'-phosphorothioate
  modified_base 22: mod_base = OTHER; note = 2'-O-methylguanosine-3'-phosphorothioate
  modified_base 23: mod_base = OTHER; note = 2'-O-methylguanosine-3'-phosphate
  misc_feature 1: note = RNA
  misc_feature 2: note = DNA
  misc_feature 3..4: note = RNA
  misc_feature 5: note = DNA
  misc_feature 6: note = RNA
  misc_feature 7: note = DNA
  misc_feature 8..11: note = RNA
  misc_feature 12: note = DNA
  misc_feature 13..23: note = RNA
actggcaggccaaggattgttgg

SEQ ID NO: 7536 - DNA, 23 bp, synthetic construct
  source 1..23: mol_type = other DNA
  modified_base 1: mod_base = OTHER; note = 2'-O-methyladenosine-3'-phosphorothioate
  modified_base 2: mod_base = OTHER; note = 2'-deoxyadenosine-3'-phosphorothioate
  modified_base 3: mod_base = OTHER; note = 2'-O-methylcytidine-3'-phosphate
  modified_base 4: mod_base = OTHER; note = 2'-O-methyluridine-3'-phosphate
  modified_base 6: mod_base = OTHER; note = 2'-O-methylguanosine-3'-phosphate
  modified_base 8: mod_base = OTHER; note = 2'-O-methyladenosine-3'-phosphate
  modified_base 9: mod_base = OTHER; note = 2'-O-methylguanosine-3'-phosphate
  modified_base 10: mod_base = OTHER; note = 2'-O-methylguanosine-3'-phosphate
  modified_base 11: mod_base = OTHER; note = 2'-O-methylcytidine-3'-phosphate
  modified_base 13: mod_base = OTHER; note = 2'-O-methyladenosine-3'-phosphate
  modified_base 14: mod_base = OTHER; note = 2'-fluoroadenosine-3'-phosphate
  modified_base 15: mod_base = OTHER; note = 2'-O-methylguanosine-3'-phosphate
  modified_base 16: mod_base = OTHER; note = 2'-O-methylguanosine-3'-phosphate
  modified_base 17: mod_base = OTHER; note = 2'-O-methyladenosine-3'-phosphate
  modified_base 18: mod_base = OTHER; note = 2'-O-methyluridine-3'-phosphate
  modified_base 19: mod_base = OTHER; note = 2'-O-methyluridine-3'-phosphate
  modified_base 20: mod_base = OTHER; note = 2'-O-methylguanosine-3'-phosphate
  modified_base 21: mod_base = OTHER; note = 2'-O-methyluridine-3'-phosphorothioate
  modified_base 22: mod_base = OTHER; note = 2'-O-methyluridine-3'-phosphorothioate
  modified_base 23: mod_base = OTHER; note = 2'-O-methylguanosine-3'-phosphate
  misc_feature 1: note = RNA
  misc_feature 2: note = DNA
  misc_feature 3..4: note = RNA
  misc_feature 5: note = DNA
  misc_feature 6: note = RNA
  misc_feature 7: note = DNA
  misc_feature 8..11: note = RNA
  misc_feature 12: note = DNA
  misc_feature 13..23: note = RNA
aactggcaggccaaggattgttg

SEQ ID NO: 7537 - DNA, 23 bp, synthetic construct
  source 1..23: mol_type = other DNA
  modified_base 1: mod_base = OTHER; note = 2'-O-methyladenosine-3'-phosphorothioate
  modified_base 2: mod_base = OTHER; note = 2'-deoxyadenosine-3'-phosphorothioate
  modified_base 3: mod_base = OTHER; note = 2'-O-methylguanosine-3'-phosphate
  modified_base 4: mod_base = OTHER; note = 2'-O-methylguanosine-3'-phosphate
  modified_base 6: mod_base = OTHER; note = 2'-O-methylguanosine-3'-phosphate
  modified_base 8: mod_base = OTHER; note = 2'-O-methyluridine-3'-phosphate
  modified_base 9: mod_base = OTHER; note = 2'-O-methyladenosine-3'-phosphate
  modified_base 10: mod_base = OTHER; note = 2'-O-methylcytidine-3'-phosphate
  modified_base 11: mod_base = OTHER; note = 2'-O-methyluridine-3'-phosphate
  modified_base 13: mod_base = OTHER; note = 2'-O-methylguanosine-3'-phosphate
  modified_base 14: mod_base = OTHER; note = 2'-fluorocytidine-3'-phosphate
  modified_base 15: mod_base = OTHER; note = 2'-O-methyladenosine-3'-phosphate
  modified_base 16: mod_base = OTHER; note = 2'-O-methylguanosine-3'-phosphate
  modified_base 17: mod_base = OTHER; note = 2'-O-methylguanosine-3'-phosphate
  modified_base 18: mod_base = OTHER; note = 2'-O-methylcytidine-3'-phosphate
  modified_base 19: mod_base = OTHER; note = 2'-O-methylcytidine-3'-phosphate
  modified_base 20: mod_base = OTHER; note = 2'-O-methyladenosine-3'-phosphate
  modified_base 21: mod_base = OTHER; note = 2'-O-methyladenosine-3'-phosphorothioate
  modified_base 22: mod_base = OTHER; note = 2'-O-methylguanosine-3'-phosphorothioate
  modified_base 23: mod_base = OTHER; note = 2'-O-methylguanosine-3'-phosphate
  misc_feature 1: note = RNA
  misc_feature 2: note = DNA
  misc_feature 3..4: note = RNA
  misc_feature 5: note = DNA
  misc_feature 6: note = RNA
  misc_feature 7: note = DNA
  misc_feature 8..11: note = RNA
  misc_feature 12: note = DNA
  misc_feature 13..23: note = RNA
aaggaggtactggcaggccaagg

SEQ ID NO: 7538 - DNA, 23 bp, synthetic construct
  source 1..23: mol_type = other DNA
  modified_base 1: mod_base = OTHER; note = 2'-O-methyladenosine-3'-phosphorothioate
  modified_base 2: mod_base = OTHER; note = 2'-deoxythimidine-3'-phosphorothioate
  modified_base 3: mod_base = OTHER; note = 2'-O-methylcytidine-3'-phosphate
  modified_base 4: mod_base = OTHER; note = 2'-O-methylguanosine-3'-phosphate
  modified_base 6: mod_base = OTHER; note = 2'-O-methylguanosine-3'-phosphate
  modified_base 8: mod_base = OTHER; note = 2'-O-methyladenosine-3'-phosphate
  modified_base 9: mod_base = OTHER; note = 2'-O-methylguanosine-3'-phosphate
  modified_base 10: mod_base = OTHER; note = 2'-O-methyluridine-3'-phosphate
  modified_base 11: mod_base = OTHER; note = 2'-O-methyladenosine-3'-phosphate
  modified_base 13: mod_base = OTHER; note = 2'-O-methylguanosine-3'-phosphate
  modified_base 14: mod_base = OTHER; note = 2'-fluoroguanosine-3'-phosphate
  modified_base 15: mod_base = OTHER; note = 2'-O-methyladenosine-3'-phosphate
  modified_base 16: mod_base = OTHER; note = 2'-O-methylcytidine-3'-phosphate
  modified_base 17: mod_base = OTHER; note = 2'-O-methyladenosine-3'-phosphate
  modified_base 18: mod_base = OTHER; note = 2'-O-methylcytidine-3'-phosphate
  modified_base 19: mod_base = OTHER; note = 2'-O-methyladenosine-3'-phosphate
  modified_base 20: mod_base = OTHER; note = 2'-O-methyladenosine-3'-phosphate
  modified_base 21: mod_base = OTHER; note = 2'-O-methylcytidine-3'-phosphorothioate
  modified_base 22: mod_base = OTHER; note = 2'-O-methyladenosine-3'-phosphorothioate
  modified_base 23: mod_base = OTHER; note = 2'-O-methylguanosine-3'-phosphate
  misc_feature 1: note = RNA
  misc_feature 2: note = DNA
  misc_feature 3..4: note = RNA
  misc_feature 5: note = DNA
  misc_feature 6: note = RNA
  misc_feature 7: note = DNA
  misc_feature 8..11: note = RNA
  misc_feature 12: note = DNA
  misc_feature 13..23: note = RNA
atcgggcagtagggacacaacag

SEQ ID NO: 7539 - DNA, 23 bp, synthetic construct
  source 1..23: mol_type = other DNA
  modified_base 1: mod_base = OTHER; note = 2'-O-methyladenosine-3'-phosphorothioate
  modified_base 2: mod_base = OTHER; note = 2'-deoxythimidine-3'-phosphorothioate
  modified_base 3: mod_base = OTHER; note = 2'-O-methyluridine-3'-phosphate
  modified_base 4: mod_base = OTHER; note = 2'-O-methylcytidine-3'-phosphate
  modified_base 6: mod_base = OTHER; note = 2'-O-methylguanosine-3'-phosphate
  modified_base 8: mod_base = OTHER; note = 2'-O-methylcytidine-3'-phosphate
  modified_base 9: mod_base = OTHER; note = 2'-O-methyladenosine-3'-phosphate
  modified_base 10: mod_base = OTHER; note = 2'-O-methylguanosine-3'-phosphate
  modified_base 11: mod_base = OTHER; note = 2'-O-methyluridine-3'-phosphate
  modified_base 13: mod_base = OTHER; note = 2'-O-methylguanosine-3'-phosphate
  modified_base 14: mod_base = OTHER; note = 2'-fluoroguanosine-3'-phosphate
  modified_base 15: mod_base = OTHER; note = 2'-O-methylguanosine-3'-phosphate
  modified_base 16: mod_base = OTHER; note = 2'-O-methyladenosine-3'-phosphate
  modified_base 17: mod_base = OTHER; note = 2'-O-methylcytidine-3'-phosphate
  modified_base 18: mod_base = OTHER; note = 2'-O-methyladenosine-3'-phosphate
  modified_base 19: mod_base = OTHER; note = 2'-O-methylcytidine-3'-phosphate
  modified_base 20: mod_base = OTHER; note = 2'-O-methyladenosine-3'-phosphate
  modified_base 21: mod_base = OTHER; note = 2'-O-methyladenosine-3'-phosphorothioate
  modified_base 22: mod_base = OTHER; note = 2'-O-methylcytidine-3'-phosphorothioate
  modified_base 23: mod_base = OTHER; note = 2'-O-methyladenosine-3'-phosphate
  misc_feature 1: note = RNA
  misc_feature 2: note = DNA
  misc_feature 3..4: note = RNA
  misc_feature 5: note = DNA
  misc_feature 6: note = RNA
  misc_feature 7: note = DNA
  misc_feature 8..11: note = RNA
  misc_feature 12: note = DNA
  misc_feature 13..23: note = RNA
attcgggcagtagggacacaaca

SEQ ID NO: 7540 - DNA, 23 bp, synthetic construct
  source 1..23: mol_type = other DNA
  modified_base 1: mod_base = OTHER; note = 2'-O-methyladenosine-3'-phosphorothioate
  modified_base 2: mod_base = OTHER; note = 2'-deoxycytidine-3'-phosphorothioate
  modified_base 3: mod_base = OTHER; note = 2'-O-methyluridine-3'-phosphate
  modified_base 4: mod_base = OTHER; note = 2'-O-methyluridine-3'-phosphate
  modified_base 6: mod_base = OTHER; note = 2'-O-methylguanosine-3'-phosphate
  modified_base 8: mod_base = OTHER; note = 2'-O-methylguanosine-3'-phosphate
  modified_base 9: mod_base = OTHER; note = 2'-O-methylcytidine-3'-phosphate
  modified_base 10: mod_base = OTHER; note = 2'-O-methyladenosine-3'-phosphate
  modified_base 11: mod_base = OTHER; note = 2'-O-methylguanosine-3'-phosphate
  modified_base 13: mod_base = OTHER; note = 2'-O-methyladenosine-3'-phosphate
  modified_base 14: mod_base = OTHER; note = 2'-fluoroguanosine-3'-phosphate
  modified_base 15: mod_base = OTHER; note = 2'-O-methylguanosine-3'-phosphate
  modified_base 16: mod_base = OTHER; note = 2'-O-methylguanosine-3'-phosphate
  modified_base 17: mod_base = OTHER; note = 2'-O-methyladenosine-3'-phosphate
  modified_base 18: mod_base = OTHER; note = 2'-O-methylcytidine-3'-phosphate
  modified_base 19: mod_base = OTHER; note = 2'-O-methyladenosine-3'-phosphate
  modified_base 20: mod_base = OTHER; note = 2'-O-methylcytidine-3'-phosphate
  modified_base 21: mod_base = OTHER; note = 2'-O-methyladenosine-3'-phosphorothioate
  modified_base 22: mod_base = OTHER; note = 2'-O-methyladenosine-3'-phosphorothioate
  modified_base 23: mod_base = OTHER; note = 2'-O-methylcytidine-3'-phosphate
  misc_feature 1: note = RNA
  misc_feature 2: note = DNA
  misc_feature 3..4: note = RNA
  misc_feature 5: note = DNA
  misc_feature 6: note = RNA
  misc_feature 7: note = DNA
  misc_feature 8..11: note = RNA
  misc_feature 12: note = DNA
  misc_feature 13..23: note = RNA
acttcgggcagtagggacacaac

SEQ ID NO: 7541 - DNA, 23 bp, synthetic construct
  source 1..23: mol_type = other DNA
  modified_base 1: mod_base = OTHER; note = 2'-O-methyladenosine-3'-phosphorothioate
  modified_base 2: mod_base = OTHER; note = 2'-deoxycytidine-3'-phosphorothioate
  modified_base 3: mod_base = OTHER; note = 2'-O-methylcytidine-3'-phosphate
  modified_base 4: mod_base = OTHER; note = 2'-O-methyluridine-3'-phosphate
  modified_base 6: mod_base = OTHER; note = 2'-O-methylcytidine-3'-phosphate
  modified_base 8: mod_base = OTHER; note = 2'-O-methylguanosine-3'-phosphate
  modified_base 9: mod_base = OTHER; note = 2'-O-methylguanosine-3'-phosphate
  modified_base 10: mod_base = OTHER; note = 2'-O-methylcytidine-3'-phosphate
  modified_base 11: mod_base = OTHER; note = 2'-O-methyladenosine-3'-phosphate
  modified_base 13: mod_base = OTHER; note = 2'-O-methyluridine-3'-phosphate
  modified_base 14: mod_base = OTHER; note = 2'-fluoroadenosine-3'-phosphate
  modified_base 15: mod_base = OTHER; note = 2'-O-methylguanosine-3'-phosphate
  modified_base 16: mod_base = OTHER; note = 2'-O-methylguanosine-3'-phosphate
  modified_base 17: mod_base = OTHER; note = 2'-O-methylguanosine-3'-phosphate
  modified_base 18: mod_base = OTHER; note = 2'-O-methyladenosine-3'-phosphate
  modified_base 19: mod_base = OTHER; note = 2'-O-methylcytidine-3'-phosphate
  modified_base 20: mod_base = OTHER; note = 2'-O-methyladenosine-3'-phosphate
  modified_base 21: mod_base = OTHER; note = 2'-O-methylcytidine-3'-phosphorothioate
  modified_base 22: mod_base = OTHER; note = 2'-O-methyladenosine-3'-phosphorothioate
  modified_base 23: mod_base = OTHER; note = 2'-O-methyladenosine-3'-phosphate
  misc_feature 1: note = RNA
  misc_feature 2: note = DNA
  misc_feature 3..4: note = RNA
  misc_feature 5: note = DNA
  misc_feature 6: note = RNA
  misc_feature 7: note = DNA
  misc_feature 8..11: note = RNA
  misc_feature 12: note = DNA
  misc_feature 13..23: note = RNA
accttcgggcagtagggacacaa

SEQ ID NO: 7542 - DNA, 23 bp, synthetic construct
  source 1..23: mol_type = other DNA
  modified_base 1: mod_base = OTHER; note = 2'-O-methyladenosine-3'-phosphorothioate
  modified_base 2: mod_base = OTHER; note = 2'-deoxyguanosine-3'-phosphorothioate
  modified_base 3: mod_base = OTHER; note = 2'-O-methylcytidine-3'-phosphate
  modified_base 4: mod_base = OTHER; note = 2'-O-methylcytidine-3'-phosphate
  modified_base 6: mod_base = OTHER; note = 2'-O-methyluridine-3'-phosphate
  modified_base 8: mod_base = OTHER; note = 2'-O-methylguanosine-3'-phosphate
  modified_base 9: mod_base = OTHER; note = 2'-O-methylguanosine-3'-phosphate
  modified_base 10: mod_base = OTHER; note = 2'-O-methylguanosine-3'-phosphate
  modified_base 11: mod_base = OTHER; note = 2'-O-methylcytidine-3'-phosphate
  modified_base 13: mod_base = OTHER; note = 2'-O-methylguanosine-3'-phosphate
  modified_base 14: mod_base = OTHER; note = 2'-fluorouridine-3'-phosphate
  modified_base 15: mod_base = OTHER; note = 2'-O-methyladenosine-3'-phosphate
  modified_base 16: mod_base = OTHER; note = 2'-O-methylguanosine-3'-phosphate
  modified_base 17: mod_base = OTHER; note = 2'-O-methylguanosine-3'-phosphate
  modified_base 18: mod_base = OTHER; note = 2'-O-methylguanosine-3'-phosphate
  modified_base 19: mod_base = OTHER; note = 2'-O-methyladenosine-3'-phosphate
  modified_base 20: mod_base = OTHER; note = 2'-O-methylcytidine-3'-phosphate
  modified_base 21: mod_base = OTHER; note = 2'-O-methyladenosine-3'-phosphorothioate
  modified_base 22: mod_base = OTHER; note = 2'-O-methylcytidine-3'-phosphorothioate
  modified_base 23: mod_base = OTHER; note = 2'-O-methyladenosine-3'-phosphate
  misc_feature 1: note = RNA
  misc_feature 2: note = DNA
  misc_feature 3..4: note = RNA
  misc_feature 5: note = DNA
  misc_feature 6: note = RNA
  misc_feature 7: note = DNA
  misc_feature 8..11: note = RNA
  misc_feature 12: note = DNA
  misc_feature 13..23: note = RNA
agccttcgggcagtagggacaca

SEQ ID NO: 7543 - DNA, 23 bp, synthetic construct
  source 1..23: mol_type = other DNA
  modified_base 1: mod_base = OTHER; note = 2'-O-methyladenosine-3'-phosphorothioate
  modified_base 2: mod_base = OTHER; note = 2'-deoxyadenosine-3'-phosphorothioate
  modified_base 3: mod_base = OTHER; note = 2'-O-methyluridine-3'-phosphate
  modified_base 4: mod_base = OTHER; note = 2'-O-methylcytidine-3'-phosphate
  modified_base 6: mod_base = OTHER; note = 2'-O-methyladenosine-3'-phosphate
  modified_base 8: mod_base = OTHER; note = 2'-O-methylguanosine-3'-phosphate
  modified_base 9: mod_base = OTHER; note = 2'-O-methyluridine-3'-phosphate
  modified_base 10: mod_base = OTHER; note = 2'-O-methyladenosine-3'-phosphate
  modified_base 11: mod_base = OTHER; note = 2'-O-methylguanosine-3'-phosphate
  modified_base 13: mod_base = OTHER; note = 2'-O-methylguanosine-3'-phosphate
  modified_base 14: mod_base = OTHER; note = 2'-fluoroguanosine-3'-phosphate
  modified_base 15: mod_base = OTHER; note = 2'-O-methyladenosine-3'-phosphate
  modified_base 16: mod_base = OTHER; note = 2'-O-methylguanosine-3'-phosphate
  modified_base 17: mod_base = OTHER; note = 2'-O-methyladenosine-3'-phosphate
  modified_base 18: mod_base = OTHER; note = 2'-O-methylguanosine-3'-phosphate
  modified_base 19: mod_base = OTHER; note = 2'-O-methyladenosine-3'-phosphate
  modified_base 20: mod_base = OTHER; note = 2'-O-methylguanosine-3'-phosphate
  modified_base 21: mod_base = OTHER; note = 2'-O-methyladenosine-3'-phosphorothioate
  modified_base 22: mod_base = OTHER; note = 2'-O-methylguanosine-3'-phosphorothioate
  modified_base 23: mod_base = OTHER; note = 2'-O-methylguanosine-3'-phosphate
  misc_feature 1: note = RNA
  misc_feature 2: note = DNA
  misc_feature 3..4: note = RNA
  misc_feature 5: note = DNA
  misc_feature 6: note = RNA
  misc_feature 7: note = DNA
  misc_feature 8..11: note = RNA
  misc_feature 12: note = DNA
  misc_feature 13..23: note = RNA
aatccaggtagaggagagagagg

SEQ ID NO: 7544 - DNA, 23 bp, synthetic construct
  source 1..23: mol_type = other DNA
  modified_base 1: mod_base = OTHER; note = 2'-O-methyladenosine-3'-phosphorothioate
  modified_base 2: mod_base = OTHER; note = 2'-deoxyguanosine-3'-phosphorothioate
  modified_base 3: mod_base = OTHER; note = 2'-O-methyladenosine-3'-phosphate
  modified_base 4: mod_base = OTHER; note = 2'-O-methyluridine-3'-phosphate
  modified_base 6: mod_base = OTHER; note = 2'-O-methylcytidine-3'-phosphate
  modified_base 8: mod_base = OTHER; note = 2'-O-methylguanosine-3'-phosphate
  modified_base 9: mod_base = OTHER; note = 2'-O-methylguanosine-3'-phosphate
  modified_base 10: mod_base = OTHER; note = 2'-O-methyluridine-3'-phosphate
  modified_base 11: mod_base = OTHER; note = 2'-O-methyladenosine-3'-phosphate
  modified_base 13: mod_base = OTHER; note = 2'-O-methyladenosine-3'-phosphate
  modified_base 14: mod_base = OTHER; note = 2'-fluoroguanosine-3'-phosphate
  modified_base 15: mod_base = OTHER; note = 2'-O-methylguanosine-3'-phosphate
  modified_base 16: mod_base = OTHER; note = 2'-O-methyladenosine-3'-phosphate
  modified_base 17: mod_base = OTHER; note = 2'-O-methylguanosine-3'-phosphate
  modified_base 18: mod_base = OTHER; note = 2'-O-methyladenosine-3'-phosphate
  modified_base 19: mod_base = OTHER; note = 2'-O-methylguanosine-3'-phosphate
  modified_base 20: mod_base = OTHER; note = 2'-O-methyladenosine-3'-phosphate
  modified_base 21: mod_base = OTHER; note = 2'-O-methylguanosine-3'-phosphorothioate
  modified_base 22: mod_base = OTHER; note = 2'-O-methyladenosine-3'-phosphorothioate
  modified_base 23: mod_base = OTHER; note = 2'-O-methylguanosine-3'-phosphate
  misc_feature 1: note = RNA
  misc_feature 2: note = DNA
  misc_feature 3..4: note = RNA
  misc_feature 5: note = DNA
  misc_feature 6: note = RNA
  misc_feature 7: note = DNA
  misc_feature 8..11: note = RNA
  misc_feature 12: note = DNA
  misc_feature 13..23: note = RNA
agatccaggtagaggagagagag

SEQ ID NO: 7545 - DNA, 23 bp, synthetic construct
  source 1..23: mol_type = other DNA
  modified_base 1: mod_base = OTHER; note = 2'-O-methyladenosine-3'-phosphorothioate
  modified_base 2: mod_base = OTHER; note = 2'-deoxythimidine-3'-phosphorothioate
  modified_base 3: mod_base = OTHER; note = 2'-O-methylguanosine-3'-phosphate
  modified_base 4: mod_base = OTHER; note = 2'-O-methyladenosine-3'-phosphate
  modified_base 6: mod_base = OTHER; note = 2'-O-methylcytidine-3'-phosphate
  modified_base 8: mod_base = OTHER; note = 2'-O-methyladenosine-3'-phosphate
  modified_base 9: mod_base = OTHER; note = 2'-O-methylguanosine-3'-phosphate
  modified_base 10: mod_base = OTHER; note = 2'-O-methylguanosine-3'-phosphate
  modified_base 11: mod_base = OTHER; note = 2'-O-methyluridine-3'-phosphate
  modified_base 13: mod_base = OTHER; note = 2'-O-methylguanosine-3'-phosphate
  modified_base 14: mod_base = OTHER; note = 2'-fluoroadenosine-3'-phosphate
  modified_base 15: mod_base = OTHER; note = 2'-O-methylguanosine-3'-phosphate
  modified_base 16: mod_base = OTHER; note = 2'-O-methylguanosine-3'-phosphate
  modified_base 17: mod_base = OTHER; note = 2'-O-methyladenosine-3'-phosphate
  modified_base 18: mod_base = OTHER; note = 2'-O-methylguanosine-3'-phosphate
  modified_base 19: mod_base = OTHER; note = 2'-O-methyladenosine-3'-phosphate
  modified_base 20: mod_base = OTHER; note = 2'-O-methylguanosine-3'-phosphate
  modified_base 21: mod_base = OTHER; note = 2'-O-methyladenosine-3'-phosphorothioate
  modified_base 22: mod_base = OTHER; note = 2'-O-methylguanosine-3'-phosphorothioate
  modified_base 23: mod_base = OTHER; note = 2'-O-methyladenosine-3'-phosphate
  misc_feature 1: note = RNA
  misc_feature 2: note = DNA
  misc_feature 3..4: note = RNA
  misc_feature 5: note = DNA
  misc_feature 6: note = RNA
  misc_feature 7: note = DNA
  misc_feature 8..11: note = RNA
  misc_feature 12: note = DNA
  misc_feature 13..23: note = RNA
atgatccaggtagaggagagaga

SEQ ID NO: 7546 - DNA, 23 bp, synthetic construct
  source 1..23: mol_type = other DNA
  modified_base 1: mod_base = OTHER; note = 2'-O-methyladenosine-3'-phosphorothioate
  modified_base 2: mod_base = OTHER; note = 2'-deoxyadenosine-3'-phosphorothioate
  modified_base 3: mod_base = OTHER; note = 2'-O-methyluridine-3'-phosphate
  modified_base 4: mod_base = OTHER; note = 2'-O-methylguanosine-3'-phosphate
  modified_base 6: mod_base = OTHER; note = 2'-O-methyluridine-3'-phosphate
  modified_base 8: mod_base = OTHER; note = 2'-O-methylcytidine-3'-phosphate
  modified_base 9: mod_base = OTHER; note = 2'-O-methyladenosine-3'-phosphate
  modified_base 10: mod_base = OTHER; note = 2'-O-methylguanosine-3'-phosphate
  modified_base 11: mod_base = OTHER; note = 2'-O-methylguanosine-3'-phosphate
  modified_base 13: mod_base = OTHER; note = 2'-O-methyladenosine-3'-phosphate
  modified_base 14: mod_base = OTHER; note = 2'-fluoroguanosine-3'-phosphate
  modified_base 15: mod_base = OTHER; note = 2'-O-methyladenosine-3'-phosphate
  modified_base 16: mod_base = OTHER; note = 2'-O-methylguanosine-3'-phosphate
  modified_base 17: mod_base = OTHER; note = 2'-O-methylguanosine-3'-phosphate
  modified_base 18: mod_base = OTHER; note = 2'-O-methyladenosine-3'-phosphate
  modified_base 19: mod_base = OTHER; note = 2'-O-methylguanosine-3'-phosphate
  modified_base 20: mod_base = OTHER; note = 2'-O-methyladenosine-3'-phosphate
  modified_base 21: mod_base = OTHER; note = 2'-O-methylguanosine-3'-phosphorothioate
  modified_base 22: mod_base = OTHER; note = 2'-O-methyladenosine-3'-phosphorothioate
  modified_base 23: mod_base = OTHER; note = 2'-O-methylguanosine-3'-phosphate
  misc_feature 1: note = RNA
  misc_feature 2: note = DNA
  misc_feature 3..4: note = RNA
  misc_feature 5: note = DNA
  misc_feature 6: note = RNA
  misc_feature 7: note = DNA
  misc_feature 8..11: note = RNA
  misc_feature 12: note = DNA
  misc_feature 13..23: note = RNA
aatgatccaggtagaggagagag

SEQ ID NO: 7547 - DNA, 23 bp, synthetic construct
  source 1..23: mol_type = other DNA
  modified_base 1: mod_base = OTHER; note = 2'-O-methyladenosine-3'-phosphorothioate
  modified_base 2: mod_base = OTHER; note = 2'-deoxythimidine-3'-phosphorothioate
  modified_base 3: mod_base = OTHER; note = 2'-O-methyladenosine-3'-phosphate
  modified_base 4: mod_base = OTHER; note = 2'-O-methyluridine-3'-phosphate
  modified_base 6: mod_base = OTHER; note = 2'-O-methyladenosine-3'-phosphate
  modified_base 8: mod_base = OTHER; note = 2'-O-methylcytidine-3'-phosphate
  modified_base 9: mod_base = OTHER; note = 2'-O-methylcytidine-3'-phosphate
  modified_base 10: mod_base = OTHER; note = 2'-O-methyladenosine-3'-phosphate
  modified_base 11: mod_base = OTHER; note = 2'-O-methylguanosine-3'-phosphate
  modified_base 13: mod_base = OTHER; note = 2'-O-methyluridine-3'-phosphate
  modified_base 14: mod_base = OTHER; note = 2'-fluoroadenosine-3'-phosphate
  modified_base 15: mod_base = OTHER; note = 2'-O-methylguanosine-3'-phosphate
  modified_base 16: mod_base = OTHER; note = 2'-O-methyladenosine-3'-phosphate
  modified_base 17: mod_base = OTHER; note = 2'-O-methylguanosine-3'-phosphate
  modified_base 18: mod_base = OTHER; note = 2'-O-methylguanosine-3'-phosphate
  modified_base 19: mod_base = OTHER; note = 2'-O-methyladenosine-3'-phosphate
  modified_base 20: mod_base = OTHER; note = 2'-O-methylguanosine-3'-phosphate
  modified_base 21: mod_base = OTHER; note = 2'-O-methyladenosine-3'-phosphorothioate
  modified_base 22: mod_base = OTHER; note = 2'-O-methylguanosine-3'-phosphorothioate
  modified_base 23: mod_base = OTHER; note = 2'-O-methyladenosine-3'-phosphate
  misc_feature 1: note = RNA
  misc_feature 2: note = DNA
  misc_feature 3..4: note = RNA
  misc_feature 5: note = DNA
  misc_feature 6: note = RNA
  misc_feature 7: note = DNA
  misc_feature 8..11: note = RNA
  misc_feature 12: note = DNA
  misc_feature 13..23: note = RNA
atatgatccaggtagaggagaga

SEQ ID NO: 7548 - DNA, 23 bp, synthetic construct
  source 1..23: mol_type = other DNA
  modified_base 1: mod_base = OTHER; note = 2'-O-methyladenosine-3'-phosphorothioate
  modified_base 2: mod_base = OTHER; note = 2'-deoxythimidine-3'-phosphorothioate
  modified_base 3: mod_base = OTHER; note = 2'-O-methyluridine-3'-phosphate
  modified_base 4: mod_base = OTHER; note = 2'-O-methyladenosine-3'-phosphate
  modified_base 6: mod_base = OTHER; note = 2'-O-methylguanosine-3'-phosphate
  modified_base 8: mod_base = OTHER; note = 2'-O-methyluridine-3'-phosphate
  modified_base 9: mod_base = OTHER; note = 2'-O-methylcytidine-3'-phosphate
  modified_base 10: mod_base = OTHER; note = 2'-O-methylcytidine-3'-phosphate
  modified_base 11: mod_base = OTHER; note = 2'-O-methyladenosine-3'-phosphate
  modified_base 13: mod_base = OTHER; note = 2'-O-methylguanosine-3'-phosphate
  modified_base 14: mod_base = OTHER; note = 2'-fluorouridine-3'-phosphate
  modified_base 15: mod_base = OTHER; note = 2'-O-methyladenosine-3'-phosphate
  modified_base 16: mod_base = OTHER; note = 2'-O-methylguanosine-3'-phosphate
  modified_base 17: mod_base = OTHER; note = 2'-O-methyladenosine-3'-phosphate
  modified_base 18: mod_base = OTHER; note = 2'-O-methylguanosine-3'-phosphate
  modified_base 19: mod_base = OTHER; note = 2'-O-methylguanosine-3'-phosphate
  modified_base 20: mod_base = OTHER; note = 2'-O-methyladenosine-3'-phosphate
  modified_base 21: mod_base = OTHER; note = 2'-O-methylguanosine-3'-phosphorothioate
  modified_base 22: mod_base = OTHER; note = 2'-O-methyladenosine-3'-phosphorothioate
  modified_base 23: mod_base = OTHER; note = 2'-O-methylguanosine-3'-phosphate
  misc_feature 1: note = RNA
  misc_feature 2: note = DNA
  misc_feature 3..4: note = RNA
  misc_feature 5: note = DNA
  misc_feature 6: note = RNA
  misc_feature 7: note = DNA
  misc_feature 8..11: note = RNA
  misc_feature 12: note = DNA
  misc_feature 13..23: note = RNA
attatgatccaggtagaggagag

SEQ ID NO: 7549 - DNA, 23 bp, synthetic construct
  source 1..23: mol_type = other DNA
  modified_base 1: mod_base = OTHER; note = 2'-O-methyladenosine-3'-phosphorothioate
  modified_base 2: mod_base = OTHER; note = 2'-deoxyadenosine-3'-phosphorothioate
  modified_base 3: mod_base = OTHER; note = 2'-O-methyluridine-3'-phosphate
  modified_base 4: mod_base = OTHER; note = 2'-O-methyluridine-3'-phosphate
  modified_base 6: mod_base = OTHER; note = 2'-O-methyluridine-3'-phosphate
  modified_base 8: mod_base = OTHER; note = 2'-O-methyladenosine-3'-phosphate
  modified_base 9: mod_base = OTHER; note = 2'-O-methyluridine-3'-phosphate
  modified_base 10: mod_base = OTHER; note = 2'-O-methylcytidine-3'-phosphate
  modified_base 11: mod_base = OTHER; note = 2'-O-methylcytidine-3'-phosphate
  modified_base 13: mod_base = OTHER; note = 2'-O-methylguanosine-3'-phosphate
  modified_base 14: mod_base = OTHER; note = 2'-fluoroguanosine-3'-phosphate
  modified_base 15: mod_base = OTHER; note = 2'-O-methyluridine-3'-phosphate
  modified_base 16: mod_base = OTHER; note = 2'-O-methyladenosine-3'-phosphate
  modified_base 17: mod_base = OTHER; note = 2'-O-methylguanosine-3'-phosphate
  modified_base 18: mod_base = OTHER; note = 2'-O-methyladenosine-3'-phosphate
  modified_base 19: mod_base = OTHER; note = 2'-O-methylguanosine-3'-phosphate
  modified_base 20: mod_base = OTHER; note = 2'-O-methylguanosine-3'-phosphate
  modified_base 21: mod_base = OTHER; note = 2'-O-methyladenosine-3'-phosphorothioate
  modified_base 22: mod_base = OTHER; note = 2'-O-methylguanosine-3'-phosphorothioate
  modified_base 23: mod_base = OTHER; note = 2'-O-methyladenosine-3'-phosphate
  misc_feature 1: note = RNA
  misc_feature 2: note = DNA
  misc_feature 3..4: note = RNA
  misc_feature 5: note = DNA
  misc_feature 6: note = RNA
  misc_feature 7: note = DNA
  misc_feature 8..11: note = RNA
  misc_feature 12: note = DNA
  misc_feature 13..23: note = RNA
aattatgatccaggtagaggaga

SEQ ID NO: 7550 - DNA, 23 bp, synthetic construct
  source 1..23: mol_type = other DNA
  modified_base 1: mod_base = OTHER; note = 2'-O-methyladenosine-3'-phosphorothioate
  modified_base 2: mod_base = OTHER; note = 2'-deoxycytidine-3'-phosphorothioate
  modified_base 3: mod_base = OTHER; note = 2'-O-methyladenosine-3'-phosphate
  modified_base 4: mod_base = OTHER; note = 2'-O-methyluridine-3'-phosphate
  modified_base 6: mod_base = OTHER; note = 2'-O-methyladenosine-3'-phosphate
  modified_base 8: mod_base = OTHER; note = 2'-O-methylguanosine-3'-phosphate
  modified_base 9: mod_base = OTHER; note = 2'-O-methyladenosine-3'-phosphate
  modified_base 10: mod_base = OTHER; note = 2'-O-methyluridine-3'-phosphate
  modified_base 11: mod_base = OTHER; note = 2'-O-methylcytidine-3'-phosphate
  modified_base 13: mod_base = OTHER; note = 2'-O-methyladenosine-3'-phosphate
  modified_base 14: mod_base = OTHER; note = 2'-fluoroguanosine-3'-phosphate
  modified_base 15: mod_base = OTHER; note = 2'-O-methylguanosine-3'-phosphate
  modified_base 16: mod_base = OTHER; note = 2'-O-methyluridine-3'-phosphate
  modified_base 17: mod_base = OTHER; note = 2'-O-methyladenosine-3'-phosphate
  modified_base 18: mod_base = OTHER; note = 2'-O-methylguanosine-3'-phosphate
  modified_base 19: mod_base = OTHER; note = 2'-O-methyladenosine-3'-phosphate
  modified_base 20: mod_base = OTHER; note = 2'-O-methylguanosine-3'-phosphate
  modified_base 21: mod_base = OTHER; note = 2'-O-methylguanosine-3'-phosphorothioate
  modified_base 22: mod_base = OTHER; note = 2'-O-methyladenosine-3'-phosphorothioate
  modified_base 23: mod_base = OTHER; note = 2'-O-methylguanosine-3'-phosphate
  misc_feature 1: note = RNA
  misc_feature 2: note = DNA
  misc_feature 3..4: note = RNA
  misc_feature 5: note = DNA
  misc_feature 6: note = RNA
  misc_feature 7: note = DNA
  misc_feature 8..11: note = RNA
  misc_feature 12: note = DNA
  misc_feature 13..23: note = RNA
acattatgatccaggtagaggag

SEQ ID NO: 7551 - DNA, 23 bp, synthetic construct
  source 1..23: mol_type = other DNA
  modified_base 1: mod_base = OTHER; note = 2'-O-methyladenosine-3'-phosphorothioate
  modified_base 2: mod_base = OTHER; note = 2'-deoxycytidine-3'-phosphorothioate
  modified_base 3: mod_base = OTHER; note = 2'-O-methylcytidine-3'-phosphate
  modified_base 4: mod_base = OTHER; note = 2'-O-methyladenosine-3'-phosphate
  modified_base 6: mod_base = OTHER; note = 2'-O-methyluridine-3'-phosphate
  modified_base 8: mod_base = OTHER; note = 2'-O-methyluridine-3'-phosphate
  modified_base 9: mod_base = OTHER; note = 2'-O-methylguanosine-3'-phosphate
  modified_base 10: mod_base = OTHER; note = 2'-O-methyladenosine-3'-phosphate
  modified_base 11: mod_base = OTHER; note = 2'-O-methyluridine-3'-phosphate
  modified_base 13: mod_base = OTHER; note = 2'-O-methylcytidine-3'-phosphate
  modified_base 14: mod_base = OTHER; note = 2'-fluoroadenosine-3'-phosphate
  modified_base 15: mod_base = OTHER; note = 2'-O-methylguanosine-3'-phosphate
  modified_base 16: mod_base = OTHER; note = 2'-O-methylguanosine-3'-phosphate
  modified_base 17: mod_base = OTHER; note = 2'-O-methyluridine-3'-phosphate
  modified_base 18: mod_base = OTHER; note = 2'-O-methyladenosine-3'-phosphate
  modified_base 19: mod_base = OTHER; note = 2'-O-methylguanosine-3'-phosphate
  modified_base 20: mod_base = OTHER; note = 2'-O-methyladenosine-3'-phosphate
  modified_base 21: mod_base = OTHER; note = 2'-O-methylguanosine-3'-phosphorothioate
  modified_base 22: mod_base = OTHER; note = 2'-O-methylguanosine-3'-phosphorothioate
  modified_base 23: mod_base = OTHER; note = 2'-O-methyladenosine-3'-phosphate
  misc_feature 1: note = RNA
  misc_feature 2: note = DNA
  misc_feature 3..4: note = RNA
  misc_feature 5: note = DNA
  misc_feature 6: note = RNA
  misc_feature 7: note = DNA
  misc_feature 8..11: note = RNA
  misc_feature 12: note = DNA
  misc_feature 13..23: note = RNA
accattatgatccaggtagagga

SEQ ID NO: 7552 - DNA, 23 bp, synthetic construct
  source 1..23: mol_type = other DNA
  modified_base 1: mod_base = OTHER; note = 2'-O-methyladenosine-3'-phosphorothioate
  modified_base 2: mod_base = OTHER; note = 2'-deoxyguanosine-3'-phosphorothioate
  modified_base 3: mod_base = OTHER; note = 2'-O-methylcytidine-3'-phosphate
  modified_base 4: mod_base = OTHER; note = 2'-O-methylcytidine-3'-phosphate
  modified_base 6: mod_base = OTHER; note = 2'-O-methyluridine-3'-phosphate
  modified_base 8: mod_base = OTHER; note = 2'-O-methyladenosine-3'-phosphate
  modified_base 9: mod_base = OTHER; note = 2'-O-methyluridine-3'-phosphate
  modified_base 10: mod_base = OTHER; note = 2'-O-methylguanosine-3'-phosphate
  modified_base 11: mod_base = OTHER; note = 2'-O-methyladenosine-3'-phosphate
  modified_base 13: mod_base = OTHER; note = 2'-O-methylcytidine-3'-phosphate
  modified_base 14: mod_base = OTHER; note = 2'-fluorocytidine-3'-phosphate
  modified_base 15: mod_base = OTHER; note = 2'-O-methyladenosine-3'-phosphate
  modified_base 16: mod_base = OTHER; note = 2'-O-methylguanosine-3'-phosphate
  modified_base 17: mod_base = OTHER; note = 2'-O-methylguanosine-3'-phosphate
  modified_base 18: mod_base = OTHER; note = 2'-O-methyluridine-3'-phosphate
  modified_base 19: mod_base = OTHER; note = 2'-O-methyladenosine-3'-phosphate
  modified_base 20: mod_base = OTHER; note = 2'-O-methylguanosine-3'-phosphate
  modified_base 21: mod_base = OTHER; note = 2'-O-methyladenosine-3'-phosphorothioate
  modified_base 22: mod_base = OTHER; note = 2'-O-methylguanosine-3'-phosphorothioate
  modified_base 23: mod_base = OTHER; note = 2'-O-methylguanosine-3'-phosphate
  misc_feature 1: note = RNA
  misc_feature 2: note = DNA
  misc_feature 3..4: note = RNA
  misc_feature 5: note = DNA
  misc_feature 6: note = RNA
  misc_feature 7: note = DNA
  misc_feature 8..11: note = RNA
  misc_feature 12: note = DNA
  misc_feature 13..23: note = RNA
agccattatgatccaggtagagg

SEQ ID NO: 7553 - DNA, 23 bp, synthetic construct
  source 1..23: mol_type = other DNA
  modified_base 1: mod_base = OTHER; note = 2'-O-methyladenosine-3'-phosphorothioate
  modified_base 2: mod_base = OTHER; note = 2'-deoxythimidine-3'-phosphorothioate
  modified_base 3: mod_base = OTHER; note = 2'-O-methylguanosine-3'-phosphate
  modified_base 4: mod_base = OTHER; note = 2'-O-methylcytidine-3'-phosphate
  modified_base 6: mod_base = OTHER; note = 2'-O-methyladenosine-3'-phosphate
  modified_base 8: mod_base = OTHER; note = 2'-O-methyluridine-3'-phosphate
  modified_base 9: mod_base = OTHER; note = 2'-O-methyladenosine-3'-phosphate
  modified_base 10: mod_base = OTHER; note = 2'-O-methyluridine-3'-phosphate
  modified_base 11: mod_base = OTHER; note = 2'-O-methylguanosine-3'-phosphate
  modified_base 13: mod_base = OTHER; note = 2'-O-methyluridine-3'-phosphate
  modified_base 14: mod_base = OTHER; note = 2'-fluorocytidine-3'-phosphate
  modified_base 15: mod_base = OTHER; note = 2'-O-methylcytidine-3'-phosphate
  modified_base 16: mod_base = OTHER; note = 2'-O-methyladenosine-3'-phosphate
  modified_base 17: mod_base = OTHER; note = 2'-O-methylguanosine-3'-phosphate
  modified_base 18: mod_base = OTHER; note = 2'-O-methylguanosine-3'-phosphate
  modified_base 19: mod_base = OTHER; note = 2'-O-methyluridine-3'-phosphate
  modified_base 20: mod_base = OTHER; note = 2'-O-methyladenosine-3'-phosphate
  modified_base 21: mod_base = OTHER; note = 2'-O-methylguanosine-3'-phosphorothioate
  modified_base 22: mod_base = OTHER; note = 2'-O-methyladenosine-3'-phosphorothioate
  modified_base 23: mod_base = OTHER; note = 2'-O-methylguanosine-3'-phosphate
  misc_feature 1: note = RNA
  misc_feature 2: note = DNA
  misc_feature 3..4: note = RNA
  misc_feature 5: note = DNA
  misc_feature 6: note = RNA
  misc_feature 7: note = DNA
  misc_feature 8..11: note = RNA
  misc_feature 12: note = DNA
  misc_feature 13..23: note = RNA
atgccattatgatccaggtagag

SEQ ID NO: 7554 - DNA, 23 bp, synthetic construct
  source 1..23: mol_type = other DNA
  modified_base 1: mod_base = OTHER; note = 2'-O-methyladenosine-3'-phosphorothioate
  modified_base 2: mod_base = OTHER; note = 2'-deoxythimidine-3'-phosphorothioate
  modified_base 3: mod_base = OTHER; note = 2'-O-methyluridine-3'-phosphate
  modified_base 4: mod_base = OTHER; note = 2'-O-methylguanosine-3'-phosphate
  modified_base 6: mod_base = OTHER; note = 2'-O-methylcytidine-3'-phosphate
  modified_base 8: mod_base = OTHER; note = 2'-O-methyluridine-3'-phosphate
  modified_base 9: mod_base = OTHER; note = 2'-O-methyluridine-3'-phosphate
  modified_base 10: mod_base = OTHER; note = 2'-O-methyladenosine-3'-phosphate
  modified_base 11: mod_base = OTHER; note = 2'-O-methyluridine-3'-phosphate
  modified_base 13: mod_base = OTHER; note = 2'-O-methyladenosine-3'-phosphate
  modified_base 14: mod_base = OTHER; note = 2'-fluorouridine-3'-phosphate
  modified_base 15: mod_base = OTHER; note = 2'-O-methylcytidine-3'-phosphate
  modified_base 16: mod_base = OTHER; note = 2'-O-methylcytidine-3'-phosphate
  modified_base 17: mod_base = OTHER; note = 2'-O-methyladenosine-3'-phosphate
  modified_base 18: mod_base = OTHER; note = 2'-O-methylguanosine-3'-phosphate
  modified_base 19: mod_base = OTHER; note = 2'-O-methylguanosine-3'-phosphate
  modified_base 20: mod_base = OTHER; note = 2'-O-methyluridine-3'-phosphate
  modified_base 21: mod_base = OTHER; note = 2'-O-methyladenosine-3'-phosphorothioate
  modified_base 22: mod_base = OTHER; note = 2'-O-methylguanosine-3'-phosphorothioate
  modified_base 23: mod_base = OTHER; note = 2'-O-methyladenosine-3'-phosphate
  misc_feature 1: note = RNA
  misc_feature 2: note = DNA
  misc_feature 3..4: note = RNA
  misc_feature 5: note = DNA
  misc_feature 6: note = RNA
  misc_feature 7: note = DNA
  misc_feature 8..11: note = RNA
  misc_feature 12: note = DNA
  misc_feature 13..23: note = RNA
attgccattatgatccaggtaga

SEQ ID NO: 7555 - DNA, 23 bp, synthetic construct
  source 1..23: mol_type = other DNA
  modified_base 1: mod_base = OTHER; note = 2'-O-methyladenosine-3'-phosphorothioate
  modified_base 2: mod_base = OTHER; note = 2'-deoxyadenosine-3'-phosphorothioate
  modified_base 3: mod_base = OTHER; note = 2'-O-methyluridine-3'-phosphate
  modified_base 4: mod_base = OTHER; note = 2'-O-methyluridine-3'-phosphate
  modified_base 6: mod_base = OTHER; note = 2'-O-methylcytidine-3'-phosphate
  modified_base 8: mod_base = OTHER; note = 2'-O-methyladenosine-3'-phosphate
  modified_base 9: mod_base = OTHER; note = 2'-O-methyluridine-3'-phosphate
  modified_base 10: mod_base = OTHER; note = 2'-O-methyluridine-3'-phosphate
  modified_base 11: mod_base = OTHER; note = 2'-O-methyladenosine-3'-phosphate
  modified_base 13: mod_base = OTHER; note = 2'-O-methylguanosine-3'-phosphate
  modified_base 14: mod_base = OTHER; note = 2'-fluoroadenosine-3'-phosphate
  modified_base 15: mod_base = OTHER; note = 2'-O-methyluridine-3'-phosphate
  modified_base 16: mod_base = OTHER; note = 2'-O-methylcytidine-3'-phosphate
  modified_base 17: mod_base = OTHER; note = 2'-O-methylcytidine-3'-phosphate
  modified_base 18: mod_base = OTHER; note = 2'-O-methyladenosine-3'-phosphate
  modified_base 19: mod_base = OTHER; note = 2'-O-methylguanosine-3'-phosphate
  modified_base 20: mod_base = OTHER; note = 2'-O-methylguanosine-3'-phosphate
  modified_base 21: mod_base = OTHER; note = 2'-O-methyluridine-3'-phosphorothioate
  modified_base 22: mod_base = OTHER; note = 2'-O-methyladenosine-3'-phosphorothioate
  modified_base 23: mod_base = OTHER; note = 2'-O-methylguanosine-3'-phosphate
  misc_feature 1: note = RNA
  misc_feature 2: note = DNA
  misc_feature 3..4: note = RNA
  misc_feature 5: note = DNA
  misc_feature 6: note = RNA
  misc_feature 7: note = DNA
  misc_feature 8..11: note = RNA
  misc_feature 12: note = DNA
  misc_feature 13..23: note = RNA
aattgccattatgatccaggtag

SEQ ID NO: 7556 - DNA, 23 bp, synthetic construct
  source 1..23: mol_type = other DNA
  modified_base 1: mod_base = OTHER; note = 2'-O-methyladenosine-3'-phosphorothioate
  modified_base 2: mod_base = OTHER; note = 2'-deoxycytidine-3'-phosphorothioate
  modified_base 3: mod_base = OTHER; note = 2'-O-methyladenosine-3'-phosphate
  modified_base 4: mod_base = OTHER; note = 2'-O-methyluridine-3'-phosphate
  modified_base 6: mod_base = OTHER; note = 2'-O-methylguanosine-3'-phosphate
  modified_base 8: mod_base = OTHER; note = 2'-O-methylcytidine-3'-phosphate
  modified_base 9: mod_base = OTHER; note = 2'-O-methyladenosine-3'-phosphate
  modified_base 10: mod_base = OTHER; note = 2'-O-methyluridine-3'-phosphate
  modified_base 11: mod_base = OTHER; note = 2'-O-methyluridine-3'-phosphate
  modified_base 13: mod_base = OTHER; note = 2'-O-methyluridine-3'-phosphate
  modified_base 14: mod_base = OTHER; note = 2'-fluoroguanosine-3'-phosphate
  modified_base 15: mod_base = OTHER; note = 2'-O-methyladenosine-3'-phosphate
  modified_base 16: mod_base = OTHER; note = 2'-O-methyluridine-3'-phosphate
  modified_base 17: mod_base = OTHER; note = 2'-O-methylcytidine-3'-phosphate
  modified_base 18: mod_base = OTHER; note = 2'-O-methylcytidine-3'-phosphate
  modified_base 19: mod_base = OTHER; note = 2'-O-methyladenosine-3'-phosphate
  modified_base 20: mod_base = OTHER; note = 2'-O-methylguanosine-3'-phosphate
  modified_base 21: mod_base = OTHER; note = 2'-O-methylguanosine-3'-phosphorothioate
  modified_base 22: mod_base = OTHER; note = 2'-O-methyluridine-3'-phosphorothioate
  modified_base 23: mod_base = OTHER; note = 2'-O-methyladenosine-3'-phosphate
  misc_feature 1: note = RNA
  misc_feature 2: note = DNA
  misc_feature 3..4: note = RNA
  misc_feature 5: note = DNA
  misc_feature 6: note = RNA
  misc_feature 7: note = DNA
  misc_feature 8..11: note = RNA
  misc_feature 12: note = DNA
  misc_feature 13..23: note = RNA
acattgccattatgatccaggta

SEQ ID NO: 7557 - DNA, 23 bp, synthetic construct
  source 1..23: mol_type = other DNA
  modified_base 1: mod_base = OTHER; note = 2'-O-methyladenosine-3'-phosphorothioate
  modified_base 2: mod_base = OTHER; note = 2'-deoxyadenosine-3'-phosphorothioate
  modified_base 3: mod_base = OTHER; note = 2'-O-methylcytidine-3'-phosphate
  modified_base 4: mod_base = OTHER; note = 2'-O-methyladenosine-3'-phosphate
  modified_base 6: mod_base = OTHER; note = 2'-O-methyluridine-3'-phosphate
  modified_base 8: mod_base = OTHER; note = 2'-O-methylcytidine-3'-phosphate
  modified_base 9: mod_base = OTHER; note = 2'-O-methylcytidine-3'-phosphate
  modified_base 10: mod_base = OTHER; note = 2'-O-methyladenosine-3'-phosphate
  modified_base 11: mod_base = OTHER; note = 2'-O-methyluridine-3'-phosphate
  modified_base 13: mod_base = OTHER; note = 2'-O-methyladenosine-3'-phosphate
  modified_base 14: mod_base = OTHER; note = 2'-fluorouridine-3'-phosphate
  modified_base 15: mod_base = OTHER; note = 2'-O-methylguanosine-3'-phosphate
  modified_base 16: mod_base = OTHER; note = 2'-O-methyladenosine-3'-phosphate
  modified_base 17: mod_base = OTHER; note = 2'-O-methyluridine-3'-phosphate
  modified_base 18: mod_base = OTHER; note = 2'-O-methylcytidine-3'-phosphate
  modified_base 19: mod_base = OTHER; note = 2'-O-methylcytidine-3'-phosphate
  modified_base 20: mod_base = OTHER; note = 2'-O-methyladenosine-3'-phosphate
  modified_base 21: mod_base = OTHER; note = 2'-O-methylguanosine-3'-phosphorothioate
  modified_base 22: mod_base = OTHER; note = 2'-O-methylguanosine-3'-phosphorothioate
  modified_base 23: mod_base = OTHER; note = 2'-O-methyluridine-3'-phosphate
  misc_feature 1: note = RNA
  misc_feature 2: note = DNA
  misc_feature 3..4: note = RNA
  misc_feature 5: note = DNA
  misc_feature 6: note = RNA
  misc_feature 7: note = DNA
  misc_feature 8..11: note = RNA
  misc_feature 12: note = DNA
  misc_feature 13..23: note = RNA
aacattgccattatgatccaggt

SEQ ID NO: 7558 - DNA, 23 bp, synthetic construct
  source 1..23: mol_type = other DNA
  modified_base 1: mod_base = OTHER; note = 2'-O-methyladenosine-3'-phosphorothioate
  modified_base 2: mod_base = OTHER; note = 2'-deoxycytidine-3'-phosphorothioate
  modified_base 3: mod_base = OTHER; note = 2'-O-methyladenosine-3'-phosphate
  modified_base 4: mod_base = OTHER; note = 2'-O-methylcytidine-3'-phosphate
  modified_base 6: mod_base = OTHER; note = 2'-O-methyluridine-3'-phosphate
  modified_base 8: mod_base = OTHER; note = 2'-O-methylguanosine-3'-phosphate
  modified_base 9: mod_base = OTHER; note = 2'-O-methylcytidine-3'-phosphate
  modified_base 10: mod_base = OTHER; note = 2'-O-methylcytidine-3'-phosphate
  modified_base 11: mod_base = OTHER; note = 2'-O-methyladenosine-3'-phosphate
  modified_base 13: mod_base = OTHER; note = 2'-O-methyluridine-3'-phosphate
  modified_base 14: mod_base = OTHER; note = 2'-fluoroadenosine-3'-phosphate
  modified_base 15: mod_base = OTHER; note = 2'-O-methyluridine-3'-phosphate
  modified_base 16: mod_base = OTHER; note = 2'-O-methylguanosine-3'-phosphate
  modified_base 17: mod_base = OTHER; note = 2'-O-methyladenosine-3'-phosphate
  modified_base 18: mod_base = OTHER; note = 2'-O-methyluridine-3'-phosphate
  modified_base 19: mod_base = OTHER; note = 2'-O-methylcytidine-3'-phosphate
  modified_base 20: mod_base = OTHER; note = 2'-O-methylcytidine-3'-phosphate
  modified_base 21: mod_base = OTHER; note = 2'-O-methyladenosine-3'-phosphorothioate
  modified_base 22: mod_base = OTHER; note = 2'-O-methylguanosine-3'-phosphorothioate
  modified_base 23: mod_base = OTHER; note = 2'-O-methylguanosine-3'-phosphate
  misc_feature 1: note = RNA
  misc_feature 2: note = DNA
  misc_feature 3..4: note = RNA
  misc_feature 5: note = DNA
  misc_feature 6: note = RNA
  misc_feature 7: note = DNA
  misc_feature 8..11: note = RNA
  misc_feature 12: note = DNA
  misc_feature 13..23: note = RNA
acacattgccattatgatccagg

SEQ ID NO: 7559 - DNA, 23 bp, synthetic construct
  source 1..23: mol_type = other DNA
  modified_base 1: mod_base = OTHER; note = 2'-O-methyladenosine-3'-phosphorothioate
  modified_base 2: mod_base = OTHER; note = 2'-deoxycytidine-3'-phosphorothioate
  modified_base 3: mod_base = OTHER; note = 2'-O-methylcytidine-3'-phosphate
  modified_base 4: mod_base = OTHER; note = 2'-O-methyladenosine-3'-phosphate
  modified_base 6: mod_base = OTHER; note = 2'-O-methyladenosine-3'-phosphate
  modified_base 8: mod_base = OTHER; note = 2'-O-methyluridine-3'-phosphate
  modified_base 9: mod_base = OTHER; note = 2'-O-methylguanosine-3'-phosphate
  modified_base 10: mod_base = OTHER; note = 2'-O-methylcytidine-3'-phosphate
  modified_base 11: mod_base = OTHER; note = 2'-O-methylcytidine-3'-phosphate
  modified_base 13: mod_base = OTHER; note = 2'-O-methyluridine-3'-phosphate
  modified_base 14: mod_base = OTHER; note = 2'-fluorouridine-3'-phosphate
  modified_base 15: mod_base = OTHER; note = 2'-O-methyladenosine-3'-phosphate
  modified_base 16: mod_base = OTHER; note = 2'-O-methyluridine-3'-phosphate
  modified_base 17: mod_base = OTHER; note = 2'-O-methylguanosine-3'-phosphate
  modified_base 18: mod_base = OTHER; note = 2'-O-methyladenosine-3'-phosphate
  modified_base 19: mod_base = OTHER; note = 2'-O-methyluridine-3'-phosphate
  modified_base 20: mod_base = OTHER; note = 2'-O-methylcytidine-3'-phosphate
  modified_base 21: mod_base = OTHER; note = 2'-O-methylcytidine-3'-phosphorothioate
  modified_base 22: mod_base = OTHER; note = 2'-O-methyladenosine-3'-phosphorothioate
  modified_base 23: mod_base = OTHER; note = 2'-O-methylguanosine-3'-phosphate
  misc_feature 1: note = RNA
  misc_feature 2: note = DNA
  misc_feature 3..4: note = RNA
  misc_feature 5: note = DNA
  misc_feature 6: note = RNA
  misc_feature 7: note = DNA
  misc_feature 8..11: note = RNA
  misc_feature 12: note = DNA
  misc_feature 13..23: note = RNA
accacattgccattatgatccag

SEQ ID NO: 7560 - DNA, 23 bp, synthetic construct
  source 1..23: mol_type = other DNA
  modified_base 1: mod_base = OTHER; note = 2'-O-methyladenosine-3'-phosphorothioate
  modified_base 2: mod_base = OTHER; note = 2'-deoxyadenosine-3'-phosphorothioate
  modified_base 3: mod_base = OTHER; note = 2'-O-methylcytidine-3'-phosphate
  modified_base 4: mod_base = OTHER; note = 2'-O-methylcytidine-3'-phosphate
  modified_base 6: mod_base = OTHER; note = 2'-O-methylcytidine-3'-phosphate
  modified_base 8: mod_base = OTHER; note = 2'-O-methyluridine-3'-phosphate
  modified_base 9: mod_base = OTHER; note = 2'-O-methyluridine-3'-phosphate
  modified_base 10: mod_base = OTHER; note = 2'-O-methylguanosine-3'-phosphate
  modified_base 11: mod_base = OTHER; note = 2'-O-methylcytidine-3'-phosphate
  modified_base 13: mod_base = OTHER; note = 2'-O-methyladenosine-3'-phosphate
  modified_base 14: mod_base = OTHER; note = 2'-fluorouridine-3'-phosphate
  modified_base 15: mod_base = OTHER; note = 2'-O-methyluridine-3'-phosphate
  modified_base 16: mod_base = OTHER; note = 2'-O-methyladenosine-3'-phosphate
  modified_base 17: mod_base = OTHER; note = 2'-O-methyluridine-3'-phosphate
  modified_base 18: mod_base = OTHER; note = 2'-O-methylguanosine-3'-phosphate
  modified_base 19: mod_base = OTHER; note = 2'-O-methyladenosine-3'-phosphate
  modified_base 20: mod_base = OTHER; note = 2'-O-methyluridine-3'-phosphate
  modified_base 21: mod_base = OTHER; note = 2'-O-methylcytidine-3'-phosphorothioate
  modified_base 22: mod_base = OTHER; note = 2'-O-methylcytidine-3'-phosphorothioate
  modified_base 23: mod_base = OTHER; note = 2'-O-methyladenosine-3'-phosphate
  misc_feature 1: note = RNA
  misc_feature 2: note = DNA
  misc_feature 3..4: note = RNA
  misc_feature 5: note = DNA
  misc_feature 6: note = RNA
  misc_feature 7: note = DNA
  misc_feature 8..11: note = RNA
  misc_feature 12: note = DNA
  misc_feature 13..23: note = RNA
aaccacattgccattatgatcca

SEQ ID NO: 7561 - DNA, 23 bp, synthetic construct
  source 1..23: mol_type = other DNA
  modified_base 1: mod_base = OTHER; note = 2'-O-methyladenosine-3'-phosphorothioate
  modified_base 2: mod_base = OTHER; note = 2'-deoxyguanosine-3'-phosphorothioate
  modified_base 3: mod_base = OTHER; note = 2'-O-methyladenosine-3'-phosphate
  modified_base 4: mod_base = OTHER; note = 2'-O-methylcytidine-3'-phosphate
  modified_base 6: mod_base = OTHER; note = 2'-O-methyladenosine-3'-phosphate
  modified_base 8: mod_base = OTHER; note = 2'-O-methyladenosine-3'-phosphate
  modified_base 9: mod_base = OTHER; note = 2'-O-methyluridine-3'-phosphate
  modified_base 10: mod_base = OTHER; note = 2'-O-methyluridine-3'-phosphate
  modified_base 11: mod_base = OTHER; note = 2'-O-methylguanosine-3'-phosphate
  modified_base 13: mod_base = OTHER; note = 2'-O-methylcytidine-3'-phosphate
  modified_base 14: mod_base = OTHER; note = 2'-fluoroadenosine-3'-phosphate
  modified_base 15: mod_base = OTHER; note = 2'-O-methyluridine-3'-phosphate
  modified_base 16: mod_base = OTHER; note = 2'-O-methyluridine-3'-phosphate
  modified_base 17: mod_base = OTHER; note = 2'-O-methyladenosine-3'-phosphate
  modified_base 18: mod_base = OTHER; note = 2'-O-methyluridine-3'-phosphate
  modified_base 19: mod_base = OTHER; note = 2'-O-methylguanosine-3'-phosphate
  modified_base 20: mod_base = OTHER; note = 2'-O-methyladenosine-3'-phosphate
  modified_base 21: mod_base = OTHER; note = 2'-O-methyluridine-3'-phosphorothioate
  modified_base 22: mod_base = OTHER; note = 2'-O-methylcytidine-3'-phosphorothioate
  modified_base 23: mod_base = OTHER; note = 2'-O-methylcytidine-3'-phosphate
  misc_feature 1: note = RNA
  misc_feature 2: note = DNA
  misc_feature 3..4: note = RNA
  misc_feature 5: note = DNA
  misc_feature 6: note = RNA
  misc_feature 7: note = DNA
  misc_feature 8..11: note = RNA
  misc_feature 12: note = DNA
  misc_feature 13..23: note = RNA
agaccacattgccattatgatcc

SEQ ID NO: 7562 - DNA, 23 bp, synthetic construct
  source 1..23: mol_type = other DNA
  modified_base 1: mod_base = OTHER; note = 2'-O-methyladenosine-3'-phosphorothioate
  modified_base 2: mod_base = OTHER; note = 2'-deoxythimidine-3'-phosphorothioate
  modified_base 3: mod_base = OTHER; note = 2'-O-methylguanosine-3'-phosphate
  modified_base 4: mod_base = OTHER; note = 2'-O-methyladenosine-3'-phosphate
  modified_base 6: mod_base = OTHER; note = 2'-O-methylcytidine-3'-phosphate
  modified_base 8: mod_base = OTHER; note = 2'-O-methylcytidine-3'-phosphate
  modified_base 9: mod_base = OTHER; note = 2'-O-methyladenosine-3'-phosphate
  modified_base 10: mod_base = OTHER; note = 2'-O-methyluridine-3'-phosphate
  modified_base 11: mod_base = OTHER; note = 2'-O-methyluridine-3'-phosphate
  modified_base 13: mod_base = OTHER; note = 2'-O-methylcytidine-3'-phosphate
  modified_base 14: mod_base = OTHER; note = 2'-fluorocytidine-3'-phosphate
  modified_base 15: mod_base = OTHER; note = 2'-O-methyladenosine-3'-phosphate
  modified_base 16: mod_base = OTHER; note = 2'-O-methyluridine-3'-phosphate
  modified_base 17: mod_base = OTHER; note = 2'-O-methyluridine-3'-phosphate
  modified_base 18: mod_base = OTHER; note = 2'-O-methyladenosine-3'-phosphate
  modified_base 19: mod_base = OTHER; note = 2'-O-methyluridine-3'-phosphate
  modified_base 20: mod_base = OTHER; note = 2'-O-methylguanosine-3'-phosphate
  modified_base 21: mod_base = OTHER; note = 2'-O-methyladenosine-3'-phosphorothioate
  modified_base 22: mod_base = OTHER; note = 2'-O-methyluridine-3'-phosphorothioate
  modified_base 23: mod_base = OTHER; note = 2'-O-methylcytidine-3'-phosphate
  misc_feature 1: note = RNA
  misc_feature 2: note = DNA
  misc_feature 3..4: note = RNA
  misc_feature 5: note = DNA
  misc_feature 6: note = RNA
  misc_feature 7: note = DNA
  misc_feature 8..11: note = RNA
  misc_feature 12: note = DNA
  misc_feature 13..23: note = RNA
atgaccacattgccattatgatc

SEQ ID NO: 7563 - DNA, 23 bp, synthetic construct
  source 1..23: mol_type = other DNA
  modified_base 1: mod_base = OTHER; note = 2'-O-methyladenosine-3'-phosphorothioate
  modified_base 2: mod_base = OTHER; note = 2'-deoxythimidine-3'-phosphorothioate
  modified_base 3: mod_base = OTHER; note = 2'-O-methyluridine-3'-phosphate
  modified_base 4: mod_base = OTHER; note = 2'-O-methylguanosine-3'-phosphate
  modified_base 6: mod_base = OTHER; note = 2'-O-methylcytidine-3'-phosphate
  modified_base 8: mod_base = OTHER; note = 2'-O-methyladenosine-3'-phosphate
  modified_base 9: mod_base = OTHER; note = 2'-O-methylcytidine-3'-phosphate
  modified_base 10: mod_base = OTHER; note = 2'-O-methyladenosine-3'-phosphate
  modified_base 11: mod_base = OTHER; note = 2'-O-methyluridine-3'-phosphate
  modified_base 13: mod_base = OTHER; note = 2'-O-methylguanosine-3'-phosphate
  modified_base 14: mod_base = OTHER; note = 2'-fluorocytidine-3'-phosphate
  modified_base 15: mod_base = OTHER; note = 2'-O-methylcytidine-3'-phosphate
  modified_base 16: mod_base = OTHER; note = 2'-O-methyladenosine-3'-phosphate
  modified_base 17: mod_base = OTHER; note = 2'-O-methyluridine-3'-phosphate
  modified_base 18: mod_base = OTHER; note = 2'-O-methyluridine-3'-phosphate
  modified_base 19: mod_base = OTHER; note = 2'-O-methyladenosine-3'-phosphate
  modified_base 20: mod_base = OTHER; note = 2'-O-methyluridine-3'-phosphate
  modified_base 21: mod_base = OTHER; note = 2'-O-methylguanosine-3'-phosphorothioate
  modified_base 22: mod_base = OTHER; note = 2'-O-methyladenosine-3'-phosphorothioate
  modified_base 23: mod_base = OTHER; note = 2'-O-methyluridine-3'-phosphate
  misc_feature 1: note = RNA
  misc_feature 2: note = DNA
  misc_feature 3..4: note = RNA
  misc_feature 5: note = DNA
  misc_feature 6: note = RNA
  misc_feature 7: note = DNA
  misc_feature 8..11: note = RNA
  misc_feature 12: note = DNA
  misc_feature 13..23: note = RNA
attgaccacattgccattatgat

SEQ ID NO: 7564 - DNA, 23 bp, synthetic construct
  source 1..23: mol_type = other DNA
  modified_base 1: mod_base = OTHER; note = 2'-O-methyladenosine-3'-phosphorothioate
  modified_base 2: mod_base = OTHER; note = 2'-deoxycytidine-3'-phosphorothioate
  modified_base 3: mod_base = OTHER; note = 2'-O-methyluridine-3'-phosphate
  modified_base 4: mod_base = OTHER; note = 2'-O-methyluridine-3'-phosphate
  modified_base 6: mod_base = OTHER; note = 2'-O-methyladenosine-3'-phosphate
  modified_base 8: mod_base = OTHER; note = 2'-O-methylcytidine-3'-phosphate
  modified_base 9: mod_base = OTHER; note = 2'-O-methyladenosine-3'-phosphate
  modified_base 10: mod_base = OTHER; note = 2'-O-methylcytidine-3'-phosphate
  modified_base 11: mod_base = OTHER; note = 2'-O-methyladenosine-3'-phosphate
  modified_base 13: mod_base = OTHER; note = 2'-O-methyluridine-3'-phosphate
  modified_base 14: mod_base = OTHER; note = 2'-fluoroguanosine-3'-phosphate
  modified_base 15: mod_base = OTHER; note = 2'-O-methylcytidine-3'-phosphate
  modified_base 16: mod_base = OTHER; note = 2'-O-methylcytidine-3'-phosphate
  modified_base 17: mod_base = OTHER; note = 2'-O-methyladenosine-3'-phosphate
  modified_base 18: mod_base = OTHER; note = 2'-O-methyluridine-3'-phosphate
  modified_base 19: mod_base = OTHER; note = 2'-O-methyluridine-3'-phosphate
  modified_base 20: mod_base = OTHER; note = 2'-O-methyladenosine-3'-phosphate
  modified_base 21: mod_base = OTHER; note = 2'-O-methyluridine-3'-phosphorothioate
  modified_base 22: mod_base = OTHER; note = 2'-O-methylguanosine-3'-phosphorothioate
  modified_base 23: mod_base = OTHER; note = 2'-O-methyladenosine-3'-phosphate
  misc_feature 1: note = RNA
  misc_feature 2: note = DNA
  misc_feature 3..4: note = RNA
  misc_feature 5: note = DNA
  misc_feature 6: note = RNA
  misc_feature 7: note = DNA
  misc_feature 8..11: note = RNA
  misc_feature 12: note = DNA
  misc_feature 13..23: note = RNA
acttgaccacattgccattatga

SEQ ID NO: 7565 - DNA, 23 bp, synthetic construct
  source 1..23: mol_type = other DNA
  modified_base 1: mod_base = OTHER; note = 2'-O-methyladenosine-3'-phosphorothioate
  modified_base 2: mod_base = OTHER; note = 2'-deoxythimidine-3'-phosphorothioate
  modified_base 3: mod_base = OTHER; note = 2'-O-methylcytidine-3'-phosphate
  modified_base 4: mod_base = OTHER; note = 2'-O-methyluridine-3'-phosphate
  modified_base 6: mod_base = OTHER; note = 2'-O-methylguanosine-3'-phosphate
  modified_base 8: mod_base = OTHER; note = 2'-O-methylcytidine-3'-phosphate
  modified_base 9: mod_base = OTHER; note = 2'-O-methylcytidine-3'-phosphate
  modified_base 10: mod_base = OTHER; note = 2'-O-methyladenosine-3'-phosphate
  modified_base 11: mod_base = OTHER; note = 2'-O-methylcytidine-3'-phosphate
  modified_base 13: mod_base = OTHER; note = 2'-O-methyluridine-3'-phosphate
  modified_base 14: mod_base = OTHER; note = 2'-fluorouridine-3'-phosphate
  modified_base 15: mod_base = OTHER; note = 2'-O-methylguanosine-3'-phosphate
  modified_base 16: mod_base = OTHER; note = 2'-O-methylcytidine-3'-phosphate
  modified_base 17: mod_base = OTHER; note = 2'-O-methylcytidine-3'-phosphate
  modified_base 18: mod_base = OTHER; note = 2'-O-methyladenosine-3'-phosphate
  modified_base 19: mod_base = OTHER; note = 2'-O-methyluridine-3'-phosphate
  modified_base 20: mod_base = OTHER; note = 2'-O-methyluridine-3'-phosphate
  modified_base 21: mod_base = OTHER; note = 2'-O-methyladenosine-3'-phosphorothioate
  modified_base 22: mod_base = OTHER; note = 2'-O-methyluridine-3'-phosphorothioate
  modified_base 23: mod_base = OTHER; note = 2'-O-methylguanosine-3'-phosphate
  misc_feature 1: note = RNA
  misc_feature 2: note = DNA
  misc_feature 3..4: note = RNA
  misc_feature 5: note = DNA
  misc_feature 6: note = RNA
  misc_feature 7: note = DNA
  misc_feature 8..11: note = RNA
  misc_feature 12: note = DNA
  misc_feature 13..23: note = RNA
atcttgaccacattgccattatg

SEQ ID NO: 7566 - DNA, 23 bp, synthetic construct
  source 1..23: mol_type = other DNA
  modified_base 1: mod_base = OTHER; note = 2'-O-methyladenosine-3'-phosphorothioate
  modified_base 2: mod_base = OTHER; note = 2'-deoxyguanosine-3'-phosphorothioate
  modified_base 3: mod_base = OTHER; note = 2'-O-methyluridine-3'-phosphate
  modified_base 4: mod_base = OTHER; note = 2'-O-methylcytidine-3'-phosphate
  modified_base 6: mod_base = OTHER; note = 2'-O-methyluridine-3'-phosphate
  modified_base 8: mod_base = OTHER; note = 2'-O-methyladenosine-3'-phosphate
  modified_base 9: mod_base = OTHER; note = 2'-O-methylcytidine-3'-phosphate
  modified_base 10: mod_base = OTHER; note = 2'-O-methylcytidine-3'-phosphate
  modified_base 11: mod_base = OTHER; note = 2'-O-methyladenosine-3'-phosphate
  modified_base 13: mod_base = OTHER; note = 2'-O-methyladenosine-3'-phosphate
  modified_base 14: mod_base = OTHER; note = 2'-fluorouridine-3'-phosphate
  modified_base 15: mod_base = OTHER; note = 2'-O-methyluridine-3'-phosphate
  modified_base 16: mod_base = OTHER; note = 2'-O-methylguanosine-3'-phosphate
  modified_base 17: mod_base = OTHER; note = 2'-O-methylcytidine-3'-phosphate
  modified_base 18: mod_base = OTHER; note = 2'-O-methylcytidine-3'-phosphate
  modified_base 19: mod_base = OTHER; note = 2'-O-methyladenosine-3'-phosphate
  modified_base 20: mod_base = OTHER; note = 2'-O-methyluridine-3'-phosphate
  modified_base 21: mod_base = OTHER; note = 2'-O-methyluridine-3'-phosphorothioate
  modified_base 22: mod_base = OTHER; note = 2'-O-methyladenosine-3'-phosphorothioate
  modified_base 23: mod_base = OTHER; note = 2'-O-methyluridine-3'-phosphate
  misc_feature 1: note = RNA
  misc_feature 2: note = DNA
  misc_feature 3..4: note = RNA
  misc_feature 5: note = DNA
  misc_feature 6: note = RNA
  misc_feature 7: note = DNA
  misc_feature 8..11: note = RNA
  misc_feature 12: note = DNA
  misc_feature 13..23: note = RNA
agtcttgaccacattgccattat

SEQ ID NO: 7567 - DNA, 23 bp, synthetic construct
  source 1..23: mol_type = other DNA
  modified_base 1: mod_base = OTHER; note = 2'-O-methyladenosine-3'-phosphorothioate
  modified_base 2: mod_base = OTHER; note = 2'-deoxycytidine-3'-phosphorothioate
  modified_base 3: mod_base = OTHER; note = 2'-O-methylguanosine-3'-phosphate
  modified_base 4: mod_base = OTHER; note = 2'-O-methyluridine-3'-phosphate
  modified_base 6: mod_base = OTHER; note = 2'-O-methyluridine-3'-phosphate
  modified_base 8: mod_base = OTHER; note = 2'-O-methylguanosine-3'-phosphate
  modified_base 9: mod_base = OTHER; note = 2'-O-methyladenosine-3'-phosphate
  modified_base 10: mod_base = OTHER; note = 2'-O-methylcytidine-3'-phosphate
  modified_base 11: mod_base = OTHER; note = 2'-O-methylcytidine-3'-phosphate
  modified_base 13: mod_base = OTHER; note = 2'-O-methylcytidine-3'-phosphate
  modified_base 14: mod_base = OTHER; note = 2'-fluoroadenosine-3'-phosphate
  modified_base 15: mod_base = OTHER; note = 2'-O-methyluridine-3'-phosphate
  modified_base 16: mod_base = OTHER; note = 2'-O-methyluridine-3'-phosphate
  modified_base 17: mod_base = OTHER; note = 2'-O-methylguanosine-3'-phosphate
  modified_base 18: mod_base = OTHER; note = 2'-O-methylcytidine-3'-phosphate
  modified_base 19: mod_base = OTHER; note = 2'-O-methylcytidine-3'-phosphate
  modified_base 20: mod_base = OTHER; note = 2'-O-methyladenosine-3'-phosphate
  modified_base 21: mod_base = OTHER; note = 2'-O-methyluridine-3'-phosphorothioate
  modified_base 22: mod_base = OTHER; note = 2'-O-methyluridine-3'-phosphorothioate
  modified_base 23: mod_base = OTHER; note = 2'-O-methyladenosine-3'-phosphate
  misc_feature 1: note = RNA
  misc_feature 2: note = DNA
  misc_feature 3..4: note = RNA
  misc_feature 5: note = DNA
  misc_feature 6: note = RNA
  misc_feature 7: note = DNA
  misc_feature 8..11: note = RNA
  misc_feature 12: note = DNA
  misc_feature 13..23: note = RNA
acgtcttgaccacattgccatta

SEQ ID NO: 7568 - DNA, 23 bp, synthetic construct
  source 1..23: mol_type = other DNA
  modified_base 1: mod_base = OTHER; note = 2'-O-methyladenosine-3'-phosphorothioate
  modified_base 2: mod_base = OTHER; note = 2'-deoxycytidine-3'-phosphorothioate
  modified_base 3: mod_base = OTHER; note = 2'-O-methylcytidine-3'-phosphate
  modified_base 4: mod_base = OTHER; note = 2'-O-methylguanosine-3'-phosphate
  modified_base 6: mod_base = OTHER; note = 2'-O-methylcytidine-3'-phosphate
  modified_base 8: mod_base = OTHER; note = 2'-O-methyluridine-3'-phosphate
  modified_base 9: mod_base = OTHER; note = 2'-O-methylguanosine-3'-phosphate
  modified_base 10: mod_base = OTHER; note = 2'-O-methyladenosine-3'-phosphate
  modified_base 11: mod_base = OTHER; note = 2'-O-methylcytidine-3'-phosphate
  modified_base 13: mod_base = OTHER; note = 2'-O-methyladenosine-3'-phosphate
  modified_base 14: mod_base = OTHER; note = 2'-fluorocytidine-3'-phosphate
  modified_base 15: mod_base = OTHER; note = 2'-O-methyladenosine-3'-phosphate
  modified_base 16: mod_base = OTHER; note = 2'-O-methyluridine-3'-phosphate
  modified_base 17: mod_base = OTHER; note = 2'-O-methyluridine-3'-phosphate
  modified_base 18: mod_base = OTHER; note = 2'-O-methylguanosine-3'-phosphate
  modified_base 19: mod_base = OTHER; note = 2'-O-methylcytidine-3'-phosphate
  modified_base 20: mod_base = OTHER; note = 2'-O-methylcytidine-3'-phosphate
  modified_base 21: mod_base = OTHER; note = 2'-O-methyladenosine-3'-phosphorothioate
  modified_base 22: mod_base = OTHER; note = 2'-O-methyluridine-3'-phosphorothioate
  modified_base 23: mod_base = OTHER; note = 2'-O-methyluridine-3'-phosphate
  misc_feature 1: note = RNA
  misc_feature 2: note = DNA
  misc_feature 3..4: note = RNA
  misc_feature 5: note = DNA
  misc_feature 6: note = RNA
  misc_feature 7: note = DNA
  misc_feature 8..11: note = RNA
  misc_feature 12: note = DNA
  misc_feature 13..23: note = RNA
accgtcttgaccacattgccatt

SEQ ID NO: 7569 - DNA, 23 bp, synthetic construct
  source 1..23: mol_type = other DNA
  modified_base 1: mod_base = OTHER; note = 2'-O-methyladenosine-3'-phosphorothioate
  modified_base 2: mod_base = OTHER; note = 2'-deoxythimidine-3'-phosphorothioate
  modified_base 3: mod_base = OTHER; note = 2'-O-methylcytidine-3'-phosphate
  modified_base 4: mod_base = OTHER; note = 2'-O-methylcytidine-3'-phosphate
  modified_base 6: mod_base = OTHER; note = 2'-O-methyluridine-3'-phosphate
  modified_base 8: mod_base = OTHER; note = 2'-O-methyluridine-3'-phosphate
  modified_base 9: mod_base = OTHER; note = 2'-O-methyluridine-3'-phosphate
  modified_base 10: mod_base = OTHER; note = 2'-O-methylguanosine-3'-phosphate
  modified_base 11: mod_base = OTHER; note = 2'-O-methyladenosine-3'-phosphate
  modified_base 13: mod_base = OTHER; note = 2'-O-methylcytidine-3'-phosphate
  modified_base 14: mod_base = OTHER; note = 2'-fluoroadenosine-3'-phosphate
  modified_base 15: mod_base = OTHER; note = 2'-O-methylcytidine-3'-phosphate
  modified_base 16: mod_base = OTHER; note = 2'-O-methyladenosine-3'-phosphate
  modified_base 17: mod_base = OTHER; note = 2'-O-methyluridine-3'-phosphate
  modified_base 18: mod_base = OTHER; note = 2'-O-methyluridine-3'-phosphate
  modified_base 19: mod_base = OTHER; note = 2'-O-methylguanosine-3'-phosphate
  modified_base 20: mod_base = OTHER; note = 2'-O-methylcytidine-3'-phosphate
  modified_base 21: mod_base = OTHER; note = 2'-O-methylcytidine-3'-phosphorothioate
  modified_base 22: mod_base = OTHER; note = 2'-O-methyladenosine-3'-phosphorothioate
  modified_base 23: mod_base = OTHER; note = 2'-O-methyluridine-3'-phosphate
  misc_feature 1: note = RNA
  misc_feature 2: note = DNA
  misc_feature 3..4: note = RNA
  misc_feature 5: note = DNA
  misc_feature 6: note = RNA
  misc_feature 7: note = DNA
  misc_feature 8..11: note = RNA
  misc_feature 12: note = DNA
  misc_feature 13..23: note = RNA
atccgtcttgaccacattgccat

SEQ ID NO: 7570 - DNA, 23 bp, synthetic construct
  source 1..23: mol_type = other DNA
  modified_base 1: mod_base = OTHER; note = 2'-O-methyladenosine-3'-phosphorothioate
  modified_base 2: mod_base = OTHER; note = 2'-deoxyadenosine-3'-phosphorothioate
  modified_base 3: mod_base = OTHER; note = 2'-O-methyluridine-3'-phosphate
  modified_base 4: mod_base = OTHER; note = 2'-O-methylcytidine-3'-phosphate
  modified_base 6: mod_base = OTHER; note = 2'-O-methylguanosine-3'-phosphate
  modified_base 8: mod_base = OTHER; note = 2'-O-methylcytidine-3'-phosphate
  modified_base 9: mod_base = OTHER; note = 2'-O-methyluridine-3'-phosphate
  modified_base 10: mod_base = OTHER; note = 2'-O-methyluridine-3'-phosphate
  modified_base 11: mod_base = OTHER; note = 2'-O-methylguanosine-3'-phosphate
  modified_base 13: mod_base = OTHER; note = 2'-O-methylcytidine-3'-phosphate
  modified_base 14: mod_base = OTHER; note = 2'-fluorocytidine-3'-phosphate
  modified_base 15: mod_base = OTHER; note = 2'-O-methyladenosine-3'-phosphate
  modified_base 16: mod_base = OTHER; note = 2'-O-methylcytidine-3'-phosphate
  modified_base 17: mod_base = OTHER; note = 2'-O-methyladenosine-3'-phosphate
  modified_base 18: mod_base = OTHER; note = 2'-O-methyluridine-3'-phosphate
  modified_base 19: mod_base = OTHER; note = 2'-O-methyluridine-3'-phosphate
  modified_base 20: mod_base = OTHER; note = 2'-O-methylguanosine-3'-phosphate
  modified_base 21: mod_base = OTHER; note = 2'-O-methylcytidine-3'-phosphorothioate
  modified_base 22: mod_base = OTHER; note = 2'-O-methylcytidine-3'-phosphorothioate
  modified_base 23: mod_base = OTHER; note = 2'-O-methyladenosine-3'-phosphate
  misc_feature 1: note = RNA
  misc_feature 2: note = DNA
  misc_feature 3..4: note = RNA
  misc_feature 5: note = DNA
  misc_feature 6: note = RNA
  misc_feature 7: note = DNA
  misc_feature 8..11: note = RNA
  misc_feature 12: note = DNA
  misc_feature 13..23: note = RNA
aatccgtcttgaccacattgcca

SEQ ID NO: 7571 - DNA, 23 bp, synthetic construct
  source 1..23: mol_type = other DNA
  modified_base 1: mod_base = OTHER; note = 2'-O-methyladenosine-3'-phosphorothioate
  modified_base 2: mod_base = OTHER; note = 2'-deoxycytidine-3'-phosphorothioate
  modified_base 3: mod_base = OTHER; note = 2'-O-methyladenosine-3'-phosphate
  modified_base 4: mod_base = OTHER; note = 2'-O-methyluridine-3'-phosphate
  modified_base 6: mod_base = OTHER; note = 2'-O-methylcytidine-3'-phosphate
  modified_base 8: mod_base = OTHER; note = 2'-O-methyluridine-3'-phosphate
  modified_base 9: mod_base = OTHER; note = 2'-O-methylcytidine-3'-phosphate
  modified_base 10: mod_base = OTHER; note = 2'-O-methyluridine-3'-phosphate
  modified_base 11: mod_base = OTHER; note = 2'-O-methyluridine-3'-phosphate
  modified_base 13: mod_base = OTHER; note = 2'-O-methyladenosine-3'-phosphate
  modified_base 14: mod_base = OTHER; note = 2'-fluorocytidine-3'-phosphate
  modified_base 15: mod_base = OTHER; note = 2'-O-methylcytidine-3'-phosphate
  modified_base 16: mod_base = OTHER; note = 2'-O-methyladenosine-3'-phosphate
  modified_base 17: mod_base = OTHER; note = 2'-O-methylcytidine-3'-phosphate
  modified_base 18: mod_base = OTHER; note = 2'-O-methyladenosine-3'-phosphate
  modified_base 19: mod_base = OTHER; note = 2'-O-methyluridine-3'-phosphate
  modified_base 20: mod_base = OTHER; note = 2'-O-methyluridine-3'-phosphate
  modified_base 21: mod_base = OTHER; note = 2'-O-methylguanosine-3'-phosphorothioate
  modified_base 22: mod_base = OTHER; note = 2'-O-methylcytidine-3'-phosphorothioate
  modified_base 23: mod_base = OTHER; note = 2'-O-methylcytidine-3'-phosphate
  misc_feature 1: note = RNA
  misc_feature 2: note = DNA
  misc_feature 3..4: note = RNA
  misc_feature 5: note = DNA
  misc_feature 6: note = RNA
  misc_feature 7: note = DNA
  misc_feature 8..11: note = RNA
  misc_feature 12: note = DNA
  misc_feature 13..23: note = RNA
acatccgtcttgaccacattgcc

SEQ ID NO: 7572 - DNA, 23 bp, synthetic construct
  source 1..23: mol_type = other DNA
  modified_base 1: mod_base = OTHER; note = 2'-O-methyladenosine-3'-phosphorothioate
  modified_base 2: mod_base = OTHER; note = 2'-deoxyadenosine-3'-phosphorothioate
  modified_base 3: mod_base = OTHER; note = 2'-O-methylcytidine-3'-phosphate
  modified_base 4: mod_base = OTHER; note = 2'-O-methyladenosine-3'-phosphate
  modified_base 6: mod_base = OTHER; note = 2'-O-methylcytidine-3'-phosphate
  modified_base 8: mod_base = OTHER; note = 2'-O-methylguanosine-3'-phosphate
  modified_base 9: mod_base = OTHER; note = 2'-O-methyluridine-3'-phosphate
  modified_base 10: mod_base = OTHER; note = 2'-O-methylcytidine-3'-phosphate
  modified_base 11: mod_base = OTHER; note = 2'-O-methyluridine-3'-phosphate
  modified_base 13: mod_base = OTHER; note = 2'-O-methylguanosine-3'-phosphate
  modified_base 14: mod_base = OTHER; note = 2'-fluoroadenosine-3'-phosphate
  modified_base 15: mod_base = OTHER; note = 2'-O-methylcytidine-3'-phosphate
  modified_base 16: mod_base = OTHER; note = 2'-O-methylcytidine-3'-phosphate
  modified_base 17: mod_base = OTHER; note = 2'-O-methyladenosine-3'-phosphate
  modified_base 18: mod_base = OTHER; note = 2'-O-methylcytidine-3'-phosphate
  modified_base 19: mod_base = OTHER; note = 2'-O-methyladenosine-3'-phosphate
  modified_base 20: mod_base = OTHER; note = 2'-O-methyluridine-3'-phosphate
  modified_base 21: mod_base = OTHER; note = 2'-O-methyluridine-3'-phosphorothioate
  modified_base 22: mod_base = OTHER; note = 2'-O-methylguanosine-3'-phosphorothioate
  modified_base 23: mod_base = OTHER; note = 2'-O-methylcytidine-3'-phosphate
  misc_feature 1: note = RNA
  misc_feature 2: note = DNA
  misc_feature 3..4: note = RNA
  misc_feature 5: note = DNA
  misc_feature 6: note = RNA
  misc_feature 7: note = DNA
  misc_feature 8..11: note = RNA
  misc_feature 12: note = DNA
  misc_feature 13..23: note = RNA
aacatccgtcttgaccacattgc

SEQ ID NO: 7573 - DNA, 23 bp, synthetic construct
  source 1..23: mol_type = other DNA
  modified_base 1: mod_base = OTHER; note = 2'-O-methyladenosine-3'-phosphorothioate
  modified_base 2: mod_base = OTHER; note = 2'-deoxycytidine-3'-phosphorothioate
  modified_base 3: mod_base = OTHER; note = 2'-O-methyladenosine-3'-phosphate
  modified_base 4: mod_base = OTHER; note = 2'-O-methylcytidine-3'-phosphate
  modified_base 6: mod_base = OTHER; note = 2'-O-methyluridine-3'-phosphate
  modified_base 8: mod_base = OTHER; note = 2'-O-methylcytidine-3'-phosphate
  modified_base 9: mod_base = OTHER; note = 2'-O-methylguanosine-3'-phosphate
  modified_base 10: mod_base = OTHER; note = 2'-O-methyluridine-3'-phosphate
  modified_base 11: mod_base = OTHER; note = 2'-O-methylcytidine-3'-phosphate
  modified_base 13: mod_base = OTHER; note = 2'-O-methyluridine-3'-phosphate
  modified_base 14: mod_base = OTHER; note = 2'-fluoroguanosine-3'-phosphate
  modified_base 15: mod_base = OTHER; note = 2'-O-methyladenosine-3'-phosphate
  modified_base 16: mod_base = OTHER; note = 2'-O-methylcytidine-3'-phosphate
  modified_base 17: mod_base = OTHER; note = 2'-O-methylcytidine-3'-phosphate
  modified_base 18: mod_base = OTHER; note = 2'-O-methyladenosine-3'-phosphate
  modified_base 19: mod_base = OTHER; note = 2'-O-methylcytidine-3'-phosphate
  modified_base 20: mod_base = OTHER; note = 2'-O-methyladenosine-3'-phosphate
  modified_base 21: mod_base = OTHER; note = 2'-O-methyluridine-3'-phosphorothioate
  modified_base 22: mod_base = OTHER; note = 2'-O-methyluridine-3'-phosphorothioate
  modified_base 23: mod_base = OTHER; note = 2'-O-methylguanosine-3'-phosphate
  misc_feature 1: note = RNA
  misc_feature 2: note = DNA
  misc_feature 3..4: note = RNA
  misc_feature 5: note = DNA
  misc_feature 6: note = RNA
  misc_feature 7: note = DNA
  misc_feature 8..11: note = RNA
  misc_feature 12: note = DNA
  misc_feature 13..23: note = RNA
acacatccgtcttgaccacattg

SEQ ID NO: 7574 - DNA, 23 bp, synthetic construct
  source 1..23: mol_type = other DNA
  modified_base 1: mod_base = OTHER; note = 2'-O-methyladenosine-3'-phosphorothioate
  modified_base 2: mod_base = OTHER; note = 2'-deoxyguanosine-3'-phosphorothioate
  modified_base 3: mod_base = OTHER; note = 2'-O-methylcytidine-3'-phosphate
  modified_base 4: mod_base = OTHER; note = 2'-O-methyladenosine-3'-phosphate
  modified_base 6: mod_base = OTHER; note = 2'-O-methyladenosine-3'-phosphate
  modified_base 8: mod_base = OTHER; note = 2'-O-methylcytidine-3'-phosphate
  modified_base 9: mod_base = OTHER; note = 2'-O-methylcytidine-3'-phosphate
  modified_base 10: mod_base = OTHER; note = 2'-O-methylguanosine-3'-phosphate
  modified_base 11: mod_base = OTHER; note = 2'-O-methyluridine-3'-phosphate
  modified_base 13: mod_base = OTHER; note = 2'-O-methyluridine-3'-phosphate
  modified_base 14: mod_base = OTHER; note = 2'-fluorouridine-3'-phosphate
  modified_base 15: mod_base = OTHER; note = 2'-O-methylguanosine-3'-phosphate
  modified_base 16: mod_base = OTHER; note = 2'-O-methyladenosine-3'-phosphate
  modified_base 17: mod_base = OTHER; note = 2'-O-methylcytidine-3'-phosphate
  modified_base 18: mod_base = OTHER; note = 2'-O-methylcytidine-3'-phosphate
  modified_base 19: mod_base = OTHER; note = 2'-O-methyladenosine-3'-phosphate
  modified_base 20: mod_base = OTHER; note = 2'-O-methylcytidine-3'-phosphate
  modified_base 21: mod_base = OTHER; note = 2'-O-methyladenosine-3'-phosphorothioate
  modified_base 22: mod_base = OTHER; note = 2'-O-methyluridine-3'-phosphorothioate
  modified_base 23: mod_base = OTHER; note = 2'-O-methyluridine-3'-phosphate
  misc_feature 1: note = RNA
  misc_feature 2: note = DNA
  misc_feature 3..4: note = RNA
  misc_feature 5: note = DNA
  misc_feature 6: note = RNA
  misc_feature 7: note = DNA
  misc_feature 8..11: note = RNA
  misc_feature 12: note = DNA
  misc_feature 13..23: note = RNA
agcacatccgtcttgaccacatt

SEQ ID NO: 7575 - DNA, 23 bp, synthetic construct
  source 1..23: mol_type = other DNA
  modified_base 1: mod_base = OTHER; note = 2'-O-methyladenosine-3'-phosphorothioate
  modified_base 2: mod_base = OTHER; note = 2'-deoxyguanosine-3'-phosphorothioate
  modified_base 3: mod_base = OTHER; note = 2'-O-methylguanosine-3'-phosphate
  modified_base 4: mod_base = OTHER; note = 2'-O-methylcytidine-3'-phosphate
  modified_base 6: mod_base = OTHER; note = 2'-O-methylcytidine-3'-phosphate
  modified_base 8: mod_base = OTHER; note = 2'-O-methyluridine-3'-phosphate
  modified_base 9: mod_base = OTHER; note = 2'-O-methylcytidine-3'-phosphate
  modified_base 10: mod_base = OTHER; note = 2'-O-methylcytidine-3'-phosphate
  modified_base 11: mod_base = OTHER; note = 2'-O-methylguanosine-3'-phosphate
  modified_base 13: mod_base = OTHER; note = 2'-O-methylcytidine-3'-phosphate
  modified_base 14: mod_base = OTHER; note = 2'-fluorouridine-3'-phosphate
  modified_base 15: mod_base = OTHER; note = 2'-O-methyluridine-3'-phosphate
  modified_base 16: mod_base = OTHER; note = 2'-O-methylguanosine-3'-phosphate
  modified_base 17: mod_base = OTHER; note = 2'-O-methyladenosine-3'-phosphate
  modified_base 18: mod_base = OTHER; note = 2'-O-methylcytidine-3'-phosphate
  modified_base 19: mod_base = OTHER; note = 2'-O-methylcytidine-3'-phosphate
  modified_base 20: mod_base = OTHER; note = 2'-O-methyladenosine-3'-phosphate
  modified_base 21: mod_base = OTHER; note = 2'-O-methylcytidine-3'-phosphorothioate
  modified_base 22: mod_base = OTHER; note = 2'-O-methyladenosine-3'-phosphorothioate
  modified_base 23: mod_base = OTHER; note = 2'-O-methyluridine-3'-phosphate
  misc_feature 1: note = RNA
  misc_feature 2: note = DNA
  misc_feature 3..4: note = RNA
  misc_feature 5: note = DNA
  misc_feature 6: note = RNA
  misc_feature 7: note = DNA
  misc_feature 8..11: note = RNA
  misc_feature 12: note = DNA
  misc_feature 13..23: note = RNA
aggcacatccgtcttgaccacat

SEQ ID NO: 7576 - DNA, 23 bp, synthetic construct
  source 1..23: mol_type = other DNA
  modified_base 1: mod_base = OTHER; note = 2'-O-methyladenosine-3'-phosphorothioate
  modified_base 2: mod_base = OTHER; note = 2'-deoxythimidine-3'-phosphorothioate
  modified_base 3: mod_base = OTHER; note = 2'-O-methylguanosine-3'-phosphate
  modified_base 4: mod_base = OTHER; note = 2'-O-methylguanosine-3'-phosphate
  modified_base 6: mod_base = OTHER; note = 2'-O-methyladenosine-3'-phosphate
  modified_base 8: mod_base = OTHER; note = 2'-O-methyladenosine-3'-phosphate
  modified_base 9: mod_base = OTHER; note = 2'-O-methyluridine-3'-phosphate
  modified_base 10: mod_base = OTHER; note = 2'-O-methylcytidine-3'-phosphate
  modified_base 11: mod_base = OTHER; note = 2'-O-methylcytidine-3'-phosphate
  modified_base 13: mod_base = OTHER; note = 2'-O-methyluridine-3'-phosphate
  modified_base 14: mod_base = OTHER; note = 2'-fluorocytidine-3'-phosphate
  modified_base 15: mod_base = OTHER; note = 2'-O-methyluridine-3'-phosphate
  modified_base 16: mod_base = OTHER; note = 2'-O-methyluridine-3'-phosphate
  modified_base 17: mod_base = OTHER; note = 2'-O-methylguanosine-3'-phosphate
  modified_base 18: mod_base = OTHER; note = 2'-O-methyladenosine-3'-phosphate
  modified_base 19: mod_base = OTHER; note = 2'-O-methylcytidine-3'-phosphate
  modified_base 20: mod_base = OTHER; note = 2'-O-methylcytidine-3'-phosphate
  modified_base 21: mod_base = OTHER; note = 2'-O-methyladenosine-3'-phosphorothioate
  modified_base 22: mod_base = OTHER; note = 2'-O-methylcytidine-3'-phosphorothioate
  modified_base 23: mod_base = OTHER; note = 2'-O-methyladenosine-3'-phosphate
  misc_feature 1: note = RNA
  misc_feature 2: note = DNA
  misc_feature 3..4: note = RNA
  misc_feature 5: note = DNA
  misc_feature 6: note = RNA
  misc_feature 7: note = DNA
  misc_feature 8..11: note = RNA
  misc_feature 12: note = DNA
  misc_feature 13..23: note = RNA
atggcacatccgtcttgaccaca

SEQ ID NO: 7577 - DNA, 23 bp, synthetic construct
  source 1..23: mol_type = other DNA
  modified_base 1: mod_base = OTHER; note = 2'-O-methyladenosine-3'-phosphorothioate
  modified_base 2: mod_base = OTHER; note = 2'-deoxycytidine-3'-phosphorothioate
  modified_base 3: mod_base = OTHER; note = 2'-O-methyluridine-3'-phosphate
  modified_base 4: mod_base = OTHER; note = 2'-O-methylguanosine-3'-phosphate
  modified_base 6: mod_base = OTHER; note = 2'-O-methylcytidine-3'-phosphate
  modified_base 8: mod_base = OTHER; note = 2'-O-methylcytidine-3'-phosphate
  modified_base 9: mod_base = OTHER; note = 2'-O-methyladenosine-3'-phosphate
  modified_base 10: mod_base = OTHER; note = 2'-O-methyluridine-3'-phosphate
  modified_base 11: mod_base = OTHER; note = 2'-O-methylcytidine-3'-phosphate
  modified_base 13: mod_base = OTHER; note = 2'-O-methylguanosine-3'-phosphate
  modified_base 14: mod_base = OTHER; note = 2'-fluorouridine-3'-phosphate
  modified_base 15: mod_base = OTHER; note = 2'-O-methylcytidine-3'-phosphate
  modified_base 16: mod_base = OTHER; note = 2'-O-methyluridine-3'-phosphate
  modified_base 17: mod_base = OTHER; note = 2'-O-methyluridine-3'-phosphate
  modified_base 18: mod_base = OTHER; note = 2'-O-methylguanosine-3'-phosphate
  modified_base 19: mod_base = OTHER; note = 2'-O-methyladenosine-3'-phosphate
  modified_base 20: mod_base = OTHER; note = 2'-O-methylcytidine-3'-phosphate
  modified_base 21: mod_base = OTHER; note = 2'-O-methylcytidine-3'-phosphorothioate
  modified_base 22: mod_base = OTHER; note = 2'-O-methyladenosine-3'-phosphorothioate
  modified_base 23: mod_base = OTHER; note = 2'-O-methylcytidine-3'-phosphate
  misc_feature 1: note = RNA
  misc_feature 2: note = DNA
  misc_feature 3..4: note = RNA
  misc_feature 5: note = DNA
  misc_feature 6: note = RNA
  misc_feature 7: note = DNA
  misc_feature 8..11: note = RNA
  misc_feature 12: note = DNA
  misc_feature 13..23: note = RNA
actggcacatccgtcttgaccac

SEQ ID NO: 7578 - DNA, 23 bp, synthetic construct
  source 1..23: mol_type = other DNA
  modified_base 1: mod_base = OTHER; note = 2'-O-methyladenosine-3'-phosphorothioate
  modified_base 2: mod_base = OTHER; note = 2'-deoxythimidine-3'-phosphorothioate
  modified_base 3: mod_base = OTHER; note = 2'-O-methylcytidine-3'-phosphate
  modified_base 4: mod_base = OTHER; note = 2'-O-methyluridine-3'-phosphate
  modified_base 6: mod_base = OTHER; note = 2'-O-methylguanosine-3'-phosphate
  modified_base 8: mod_base = OTHER; note = 2'-O-methyladenosine-3'-phosphate
  modified_base 9: mod_base = OTHER; note = 2'-O-methylcytidine-3'-phosphate
  modified_base 10: mod_base = OTHER; note = 2'-O-methyladenosine-3'-phosphate
  modified_base 11: mod_base = OTHER; note = 2'-O-methyluridine-3'-phosphate
  modified_base 13: mod_base = OTHER; note = 2'-O-methylcytidine-3'-phosphate
  modified_base 14: mod_base = OTHER; note = 2'-fluoroguanosine-3'-phosphate
  modified_base 15: mod_base = OTHER; note = 2'-O-methyluridine-3'-phosphate
  modified_base 16: mod_base = OTHER; note = 2'-O-methylcytidine-3'-phosphate
  modified_base 17: mod_base = OTHER; note = 2'-O-methyluridine-3'-phosphate
  modified_base 18: mod_base = OTHER; note = 2'-O-methyluridine-3'-phosphate
  modified_base 19: mod_base = OTHER; note = 2'-O-methylguanosine-3'-phosphate
  modified_base 20: mod_base = OTHER; note = 2'-O-methyladenosine-3'-phosphate
  modified_base 21: mod_base = OTHER; note = 2'-O-methylcytidine-3'-phosphorothioate
  modified_base 22: mod_base = OTHER; note = 2'-O-methylcytidine-3'-phosphorothioate
  modified_base 23: mod_base = OTHER; note = 2'-O-methyladenosine-3'-phosphate
  misc_feature 1: note = RNA
  misc_feature 2: note = DNA
  misc_feature 3..4: note = RNA
  misc_feature 5: note = DNA
  misc_feature 6: note = RNA
  misc_feature 7: note = DNA
  misc_feature 8..11: note = RNA
  misc_feature 12: note = DNA
  misc_feature 13..23: note = RNA
atctggcacatccgtcttgacca

SEQ ID NO: 7579 - DNA, 23 bp, synthetic construct
  source 1..23: mol_type = other DNA
  modified_base 1: mod_base = OTHER; note = 2'-O-methyladenosine-3'-phosphorothioate
  modified_base 2: mod_base = OTHER; note = 2'-deoxyadenosine-3'-phosphorothioate
  modified_base 3: mod_base = OTHER; note = 2'-O-methyluridine-3'-phosphate
  modified_base 4: mod_base = OTHER; note = 2'-O-methylcytidine-3'-phosphate
  modified_base 6: mod_base = OTHER; note = 2'-O-methylguanosine-3'-phosphate
  modified_base 8: mod_base = OTHER; note = 2'-O-methylcytidine-3'-phosphate
  modified_base 9: mod_base = OTHER; note = 2'-O-methyladenosine-3'-phosphate
  modified_base 10: mod_base = OTHER; note = 2'-O-methylcytidine-3'-phosphate
  modified_base 11: mod_base = OTHER; note = 2'-O-methyladenosine-3'-phosphate
  modified_base 13: mod_base = OTHER; note = 2'-O-methylcytidine-3'-phosphate
  modified_base 14: mod_base = OTHER; note = 2'-fluorocytidine-3'-phosphate
  modified_base 15: mod_base = OTHER; note = 2'-O-methylguanosine-3'-phosphate
  modified_base 16: mod_base = OTHER; note = 2'-O-methyluridine-3'-phosphate
  modified_base 17: mod_base = OTHER; note = 2'-O-methylcytidine-3'-phosphate
  modified_base 18: mod_base = OTHER; note = 2'-O-methyluridine-3'-phosphate
  modified_base 19: mod_base = OTHER; note = 2'-O-methyluridine-3'-phosphate
  modified_base 20: mod_base = OTHER; note = 2'-O-methylguanosine-3'-phosphate
  modified_base 21: mod_base = OTHER; note = 2'-O-methyladenosine-3'-phosphorothioate
  modified_base 22: mod_base = OTHER; note = 2'-O-methylcytidine-3'-phosphorothioate
  modified_base 23: mod_base = OTHER; note = 2'-O-methylcytidine-3'-phosphate
  misc_feature 1: note = RNA
  misc_feature 2: note = DNA
  misc_feature 3..4: note = RNA
  misc_feature 5: note = DNA
  misc_feature 6: note = RNA
  misc_feature 7: note = DNA
  misc_feature 8..11: note = RNA
  misc_feature 12: note = DNA
  misc_feature 13..23: note = RNA
aatctggcacatccgtcttgacc

SEQ ID NO: 7580 - DNA, 23 bp, synthetic construct
  source 1..23: mol_type = other DNA
  modified_base 1: mod_base = OTHER; note = 2'-O-methyladenosine-3'-phosphorothioate
  modified_base 2: mod_base = OTHER; note = 2'-deoxythimidine-3'-phosphorothioate
  modified_base 3: mod_base = OTHER; note = 2'-O-methyladenosine-3'-phosphate
  modified_base 4: mod_base = OTHER; note = 2'-O-methyluridine-3'-phosphate
  modified_base 6: mod_base = OTHER; note = 2'-O-methyluridine-3'-phosphate
  modified_base 8: mod_base = OTHER; note = 2'-O-methylguanosine-3'-phosphate
  modified_base 9: mod_base = OTHER; note = 2'-O-methylcytidine-3'-phosphate
  modified_base 10: mod_base = OTHER; note = 2'-O-methyladenosine-3'-phosphate
  modified_base 11: mod_base = OTHER; note = 2'-O-methylcytidine-3'-phosphate
  modified_base 13: mod_base = OTHER; note = 2'-O-methyluridine-3'-phosphate
  modified_base 14: mod_base = OTHER; note = 2'-fluorocytidine-3'-phosphate
  modified_base 15: mod_base = OTHER; note = 2'-O-methylcytidine-3'-phosphate
  modified_base 16: mod_base = OTHER; note = 2'-O-methylguanosine-3'-phosphate
  modified_base 17: mod_base = OTHER; note = 2'-O-methyluridine-3'-phosphate
  modified_base 18: mod_base = OTHER; note = 2'-O-methylcytidine-3'-phosphate
  modified_base 19: mod_base = OTHER; note = 2'-O-methyluridine-3'-phosphate
  modified_base 20: mod_base = OTHER; note = 2'-O-methyluridine-3'-phosphate
  modified_base 21: mod_base = OTHER; note = 2'-O-methylguanosine-3'-phosphorothioate
  modified_base 22: mod_base = OTHER; note = 2'-O-methyladenosine-3'-phosphorothioate
  modified_base 23: mod_base = OTHER; note = 2'-O-methylcytidine-3'-phosphate
  misc_feature 1: note = RNA
  misc_feature 2: note = DNA
  misc_feature 3..4: note = RNA
  misc_feature 5: note = DNA
  misc_feature 6: note = RNA
  misc_feature 7: note = DNA
  misc_feature 8..11: note = RNA
  misc_feature 12: note = DNA
  misc_feature 13..23: note = RNA
atatctggcacatccgtcttgac

SEQ ID NO: 7581 - DNA, 23 bp, synthetic construct
  source 1..23: mol_type = other DNA
  modified_base 1: mod_base = OTHER; note = 2'-O-methyladenosine-3'-phosphorothioate
  modified_base 2: mod_base = OTHER; note = 2'-deoxyadenosine-3'-phosphorothioate
  modified_base 3: mod_base = OTHER; note = 2'-O-methyluridine-3'-phosphate
  modified_base 4: mod_base = OTHER; note = 2'-O-methyladenosine-3'-phosphate
  modified_base 6: mod_base = OTHER; note = 2'-O-methylcytidine-3'-phosphate
  modified_base 8: mod_base = OTHER; note = 2'-O-methylguanosine-3'-phosphate
  modified_base 9: mod_base = OTHER; note = 2'-O-methylguanosine-3'-phosphate
  modified_base 10: mod_base = OTHER; note = 2'-O-methylcytidine-3'-phosphate
  modified_base 11: mod_base = OTHER; note = 2'-O-methyladenosine-3'-phosphate
  modified_base 13: mod_base = OTHER; note = 2'-O-methyladenosine-3'-phosphate
  modified_base 14: mod_base = OTHER; note = 2'-fluorouridine-3'-phosphate
  modified_base 15: mod_base = OTHER; note = 2'-O-methylcytidine-3'-phosphate
  modified_base 16: mod_base = OTHER; note = 2'-O-methylcytidine-3'-phosphate
  modified_base 17: mod_base = OTHER; note = 2'-O-methylguanosine-3'-phosphate
  modified_base 18: mod_base = OTHER; note = 2'-O-methyluridine-3'-phosphate
  modified_base 19: mod_base = OTHER; note = 2'-O-methylcytidine-3'-phosphate
  modified_base 20: mod_base = OTHER; note = 2'-O-methyluridine-3'-phosphate
  modified_base 21: mod_base = OTHER; note = 2'-O-methyluridine-3'-phosphorothioate
  modified_base 22: mod_base = OTHER; note = 2'-O-methylguanosine-3'-phosphorothioate
  modified_base 23: mod_base = OTHER; note = 2'-O-methyladenosine-3'-phosphate
  misc_feature 1: note = RNA
  misc_feature 2: note = DNA
  misc_feature 3..4: note = RNA
  misc_feature 5: note = DNA
  misc_feature 6: note = RNA
  misc_feature 7: note = DNA
  misc_feature 8..11: note = RNA
  misc_feature 12: note = DNA
  misc_feature 13..23: note = RNA
aatatctggcacatccgtcttga

SEQ ID NO: 7582 - DNA, 23 bp, synthetic construct
  source 1..23: mol_type = other DNA
  modified_base 1: mod_base = OTHER; note = 2'-O-methyladenosine-3'-phosphorothioate
  modified_base 2: mod_base = OTHER; note = 2'-deoxycytidine-3'-phosphorothioate
  modified_base 3: mod_base = OTHER; note = 2'-O-methyladenosine-3'-phosphate
  modified_base 4: mod_base = OTHER; note = 2'-O-methyluridine-3'-phosphate
  modified_base 6: mod_base = OTHER; note = 2'-O-methyluridine-3'-phosphate
  modified_base 8: mod_base = OTHER; note = 2'-O-methyluridine-3'-phosphate
  modified_base 9: mod_base = OTHER; note = 2'-O-methylguanosine-3'-phosphate
  modified_base 10: mod_base = OTHER; note = 2'-O-methylguanosine-3'-phosphate
  modified_base 11: mod_base = OTHER; note = 2'-O-methylcytidine-3'-phosphate
  modified_base 13: mod_base = OTHER; note = 2'-O-methylcytidine-3'-phosphate
  modified_base 14: mod_base = OTHER; note = 2'-fluoroadenosine-3'-phosphate
  modified_base 15: mod_base = OTHER; note = 2'-O-methyluridine-3'-phosphate
  modified_base 16: mod_base = OTHER; note = 2'-O-methylcytidine-3'-phosphate
  modified_base 17: mod_base = OTHER; note = 2'-O-methylcytidine-3'-phosphate
  modified_base 18: mod_base = OTHER; note = 2'-O-methylguanosine-3'-phosphate
  modified_base 19: mod_base = OTHER; note = 2'-O-methyluridine-3'-phosphate
  modified_base 20: mod_base = OTHER; note = 2'-O-methylcytidine-3'-phosphate
  modified_base 21: mod_base = OTHER; note = 2'-O-methyluridine-3'-phosphorothioate
  modified_base 22: mod_base = OTHER; note = 2'-O-methyluridine-3'-phosphorothioate
  modified_base 23: mod_base = OTHER; note = 2'-O-methylguanosine-3'-phosphate
  misc_feature 1: note = RNA
  misc_feature 2: note = DNA
  misc_feature 3..4: note = RNA
  misc_feature 5: note = DNA
  misc_feature 6: note = RNA
  misc_feature 7: note = DNA
  misc_feature 8..11: note = RNA
  misc_feature 12: note = DNA
  misc_feature 13..23: note = RNA
acatatctggcacatccgtcttg

SEQ ID NO: 7583 - DNA, 23 bp, synthetic construct
  source 1..23: mol_type = other DNA
  modified_base 1: mod_base = OTHER; note = 2'-O-methyladenosine-3'-phosphorothioate
  modified_base 2: mod_base = OTHER; note = 2'-deoxycytidine-3'-phosphorothioate
  modified_base 3: mod_base = OTHER; note = 2'-O-methylcytidine-3'-phosphate
  modified_base 4: mod_base = OTHER; note = 2'-O-methyladenosine-3'-phosphate
  modified_base 6: mod_base = OTHER; note = 2'-O-methyladenosine-3'-phosphate
  modified_base 8: mod_base = OTHER; note = 2'-O-methylcytidine-3'-phosphate
  modified_base 9: mod_base = OTHER; note = 2'-O-methyluridine-3'-phosphate
  modified_base 10: mod_base = OTHER; note = 2'-O-methylguanosine-3'-phosphate
  modified_base 11: mod_base = OTHER; note = 2'-O-methylguanosine-3'-phosphate
  modified_base 13: mod_base = OTHER; note = 2'-O-methyladenosine-3'-phosphate
  modified_base 14: mod_base = OTHER; note = 2'-fluorocytidine-3'-phosphate
  modified_base 15: mod_base = OTHER; note = 2'-O-methyladenosine-3'-phosphate
  modified_base 16: mod_base = OTHER; note = 2'-O-methyluridine-3'-phosphate
  modified_base 17: mod_base = OTHER; note = 2'-O-methylcytidine-3'-phosphate
  modified_base 18: mod_base = OTHER; note = 2'-O-methylcytidine-3'-phosphate
  modified_base 19: mod_base = OTHER; note = 2'-O-methylguanosine-3'-phosphate
  modified_base 20: mod_base = OTHER; note = 2'-O-methyluridine-3'-phosphate
  modified_base 21: mod_base = OTHER; note = 2'-O-methylcytidine-3'-phosphorothioate
  modified_base 22: mod_base = OTHER; note = 2'-O-methyluridine-3'-phosphorothioate
  modified_base 23: mod_base = OTHER; note = 2'-O-methyluridine-3'-phosphate
  misc_feature 1: note = RNA
  misc_feature 2: note = DNA
  misc_feature 3..4: note = RNA
  misc_feature 5: note = DNA
  misc_feature 6: note = RNA
  misc_feature 7: note = DNA
  misc_feature 8..11: note = RNA
  misc_feature 12: note = DNA
  misc_feature 13..23: note = RNA
accatatctggcacatccgtctt

SEQ ID NO: 7584 - DNA, 23 bp, synthetic construct
  source 1..23: mol_type = other DNA
  modified_base 1: mod_base = OTHER; note = 2'-O-methyladenosine-3'-phosphorothioate
  modified_base 2: mod_base = OTHER; note = 2'-deoxyadenosine-3'-phosphorothioate
  modified_base 3: mod_base = OTHER; note = 2'-O-methylcytidine-3'-phosphate
  modified_base 4: mod_base = OTHER; note = 2'-O-methylcytidine-3'-phosphate
  modified_base 6: mod_base = OTHER; note = 2'-O-methyluridine-3'-phosphate
  modified_base 8: mod_base = OTHER; note = 2'-O-methyluridine-3'-phosphate
  modified_base 9: mod_base = OTHER; note = 2'-O-methylcytidine-3'-phosphate
  modified_base 10: mod_base = OTHER; note = 2'-O-methyluridine-3'-phosphate
  modified_base 11: mod_base = OTHER; note = 2'-O-methylguanosine-3'-phosphate
  modified_base 13: mod_base = OTHER; note = 2'-O-methylcytidine-3'-phosphate
  modified_base 14: mod_base = OTHER; note = 2'-fluoroadenosine-3'-phosphate
  modified_base 15: mod_base = OTHER; note = 2'-O-methylcytidine-3'-phosphate
  modified_base 16: mod_base = OTHER; note = 2'-O-methyladenosine-3'-phosphate
  modified_base 17: mod_base = OTHER; note = 2'-O-methyluridine-3'-phosphate
  modified_base 18: mod_base = OTHER; note = 2'-O-methylcytidine-3'-phosphate
  modified_base 19: mod_base = OTHER; note = 2'-O-methylcytidine-3'-phosphate
  modified_base 20: mod_base = OTHER; note = 2'-O-methylguanosine-3'-phosphate
  modified_base 21: mod_base = OTHER; note = 2'-O-methyluridine-3'-phosphorothioate
  modified_base 22: mod_base = OTHER; note = 2'-O-methylcytidine-3'-phosphorothioate
  modified_base 23: mod_base = OTHER; note = 2'-O-methyluridine-3'-phosphate
  misc_feature 1: note = RNA
  misc_feature 2: note = DNA
  misc_feature 3..4: note = RNA
  misc_feature 5: note = DNA
  misc_feature 6: note = RNA
  misc_feature 7: note = DNA
  misc_feature 8..11: note = RNA
  misc_feature 12: note = DNA
  misc_feature 13..23: note = RNA
aaccatatctggcacatccgtct

SEQ ID NO: 7585 - DNA, 23 bp, synthetic construct
  source 1..23: mol_type = other DNA
  modified_base 1: mod_base = OTHER; note = 2'-O-methyladenosine-3'-phosphorothioate
  modified_base 2: mod_base = OTHER; note = 2'-deoxycytidine-3'-phosphorothioate
  modified_base 3: mod_base = OTHER; note = 2'-O-methyladenosine-3'-phosphate
  modified_base 4: mod_base = OTHER; note = 2'-O-methylcytidine-3'-phosphate
  modified_base 6: mod_base = OTHER; note = 2'-O-methyladenosine-3'-phosphate
  modified_base 8: mod_base = OTHER; note = 2'-O-methyladenosine-3'-phosphate
  modified_base 9: mod_base = OTHER; note = 2'-O-methyluridine-3'-phosphate
  modified_base 10: mod_base = OTHER; note = 2'-O-methylcytidine-3'-phosphate
  modified_base 11: mod_base = OTHER; note = 2'-O-methyluridine-3'-phosphate
  modified_base 13: mod_base = OTHER; note = 2'-O-methylguanosine-3'-phosphate
  modified_base 14: mod_base = OTHER; note = 2'-fluorocytidine-3'-phosphate
  modified_base 15: mod_base = OTHER; note = 2'-O-methyladenosine-3'-phosphate
  modified_base 16: mod_base = OTHER; note = 2'-O-methylcytidine-3'-phosphate
  modified_base 17: mod_base = OTHER; note = 2'-O-methyladenosine-3'-phosphate
  modified_base 18: mod_base = OTHER; note = 2'-O-methyluridine-3'-phosphate
  modified_base 19: mod_base = OTHER; note = 2'-O-methylcytidine-3'-phosphate
  modified_base 20: mod_base = OTHER; note = 2'-O-methylcytidine-3'-phosphate
  modified_base 21: mod_base = OTHER; note = 2'-O-methylguanosine-3'-phosphorothioate
  modified_base 22: mod_base = OTHER; note = 2'-O-methyluridine-3'-phosphorothioate
  modified_base 23: mod_base = OTHER; note = 2'-O-methylcytidine-3'-phosphate
  misc_feature 1: note = RNA
  misc_feature 2: note = DNA
  misc_feature 3..4: note = RNA
  misc_feature 5: note = DNA
  misc_feature 6: note = RNA
  misc_feature 7: note = DNA
  misc_feature 8..11: note = RNA
  misc_feature 12: note = DNA
  misc_feature 13..23: note = RNA
acaccatatctggcacatccgtc

SEQ ID NO: 7586 - DNA, 23 bp, synthetic construct
  source 1..23: mol_type = other DNA
  modified_base 1: mod_base = OTHER; note = 2'-O-methyladenosine-3'-phosphorothioate
  modified_base 2: mod_base = OTHER; note = 2'-deoxyadenosine-3'-phosphorothioate
  modified_base 3: mod_base = OTHER; note = 2'-O-methylcytidine-3'-phosphate
  modified_base 4: mod_base = OTHER; note = 2'-O-methylcytidine-3'-phosphate
  modified_base 6: mod_base = OTHER; note = 2'-O-methylcytidine-3'-phosphate
  modified_base 8: mod_base = OTHER; note = 2'-O-methyladenosine-3'-phosphate
  modified_base 9: mod_base = OTHER; note = 2'-O-methyluridine-3'-phosphate
  modified_base 10: mod_base = OTHER; note = 2'-O-methyladenosine-3'-phosphate
  modified_base 11: mod_base = OTHER; note = 2'-O-methyluridine-3'-phosphate
  modified_base 13: mod_base = OTHER; note = 2'-O-methyluridine-3'-phosphate
  modified_base 14: mod_base = OTHER; note = 2'-fluoroguanosine-3'-phosphate
  modified_base 15: mod_base = OTHER; note = 2'-O-methylguanosine-3'-phosphate
  modified_base 16: mod_base = OTHER; note = 2'-O-methylcytidine-3'-phosphate
  modified_base 17: mod_base = OTHER; note = 2'-O-methyladenosine-3'-phosphate
  modified_base 18: mod_base = OTHER; note = 2'-O-methylcytidine-3'-phosphate
  modified_base 19: mod_base = OTHER; note = 2'-O-methyladenosine-3'-phosphate
  modified_base 20: mod_base = OTHER; note = 2'-O-methyluridine-3'-phosphate
  modified_base 21: mod_base = OTHER; note = 2'-O-methylcytidine-3'-phosphorothioate
  modified_base 22: mod_base = OTHER; note = 2'-O-methylcytidine-3'-phosphorothioate
  modified_base 23: mod_base = OTHER; note = 2'-O-methylguanosine-3'-phosphate
  misc_feature 1: note = RNA
  misc_feature 2: note = DNA
  misc_feature 3..4: note = RNA
  misc_feature 5: note = DNA
  misc_feature 6: note = RNA
  misc_feature 7: note = DNA
  misc_feature 8..11: note = RNA
  misc_feature 12: note = DNA
  misc_feature 13..23: note = RNA
aaccaccatatctggcacatccg

SEQ ID NO: 7587 - DNA, 23 bp, synthetic construct
  source 1..23: mol_type = other DNA
  modified_base 1: mod_base = OTHER; note = 2'-O-methyladenosine-3'-phosphorothioate
  modified_base 2: mod_base = OTHER; note = 2'-deoxycytidine-3'-phosphorothioate
  modified_base 3: mod_base = OTHER; note = 2'-O-methyladenosine-3'-phosphate
  modified_base 4: mod_base = OTHER; note = 2'-O-methylcytidine-3'-phosphate
  modified_base 6: mod_base = OTHER; note = 2'-O-methyladenosine-3'-phosphate
  modified_base 8: mod_base = OTHER; note = 2'-O-methylcytidine-3'-phosphate
  modified_base 9: mod_base = OTHER; note = 2'-O-methyladenosine-3'-phosphate
  modified_base 10: mod_base = OTHER; note = 2'-O-methyluridine-3'-phosphate
  modified_base 11: mod_base = OTHER; note = 2'-O-methyladenosine-3'-phosphate
  modified_base 13: mod_base = OTHER; note = 2'-O-methylcytidine-3'-phosphate
  modified_base 14: mod_base = OTHER; note = 2'-fluorouridine-3'-phosphate
  modified_base 15: mod_base = OTHER; note = 2'-O-methylguanosine-3'-phosphate
  modified_base 16: mod_base = OTHER; note = 2'-O-methylguanosine-3'-phosphate
  modified_base 17: mod_base = OTHER; note = 2'-O-methylcytidine-3'-phosphate
  modified_base 18: mod_base = OTHER; note = 2'-O-methyladenosine-3'-phosphate
  modified_base 19: mod_base = OTHER; note = 2'-O-methylcytidine-3'-phosphate
  modified_base 20: mod_base = OTHER; note = 2'-O-methyladenosine-3'-phosphate
  modified_base 21: mod_base = OTHER; note = 2'-O-methyluridine-3'-phosphorothioate
  modified_base 22: mod_base = OTHER; note = 2'-O-methylcytidine-3'-phosphorothioate
  modified_base 23: mod_base = OTHER; note = 2'-O-methylcytidine-3'-phosphate
  misc_feature 1: note = RNA
  misc_feature 2: note = DNA
  misc_feature 3..4: note = RNA
  misc_feature 5: note = DNA
  misc_feature 6: note = RNA
  misc_feature 7: note = DNA
  misc_feature 8..11: note = RNA
  misc_feature 12: note = DNA
  misc_feature 13..23: note = RNA
acaccaccatatctggcacatcc

SEQ ID NO: 7588 - DNA, 23 bp, synthetic construct
  source 1..23: mol_type = other DNA
  modified_base 1: mod_base = OTHER; note = 2'-O-methyladenosine-3'-phosphorothioate
  modified_base 2: mod_base = OTHER; note = 2'-deoxycytidine-3'-phosphorothioate
  modified_base 3: mod_base = OTHER; note = 2'-O-methylcytidine-3'-phosphate
  modified_base 4: mod_base = OTHER; note = 2'-O-methyladenosine-3'-phosphate
  modified_base 6: mod_base = OTHER; note = 2'-O-methylcytidine-3'-phosphate
  modified_base 8: mod_base = OTHER; note = 2'-O-methylcytidine-3'-phosphate
  modified_base 9: mod_base = OTHER; note = 2'-O-methylcytidine-3'-phosphate
  modified_base 10: mod_base = OTHER; note = 2'-O-methyladenosine-3'-phosphate
  modified_base 11: mod_base = OTHER; note = 2'-O-methyluridine-3'-phosphate
  modified_base 13: mod_base = OTHER; note = 2'-O-methyluridine-3'-phosphate
  modified_base 14: mod_base = OTHER; note = 2'-fluorocytidine-3'-phosphate
  modified_base 15: mod_base = OTHER; note = 2'-O-methyluridine-3'-phosphate
  modified_base 16: mod_base = OTHER; note = 2'-O-methylguanosine-3'-phosphate
  modified_base 17: mod_base = OTHER; note = 2'-O-methylguanosine-3'-phosphate
  modified_base 18: mod_base = OTHER; note = 2'-O-methylcytidine-3'-phosphate
  modified_base 19: mod_base = OTHER; note = 2'-O-methyladenosine-3'-phosphate
  modified_base 20: mod_base = OTHER; note = 2'-O-methylcytidine-3'-phosphate
  modified_base 21: mod_base = OTHER; note = 2'-O-methyladenosine-3'-phosphorothioate
  modified_base 22: mod_base = OTHER; note = 2'-O-methyluridine-3'-phosphorothioate
  modified_base 23: mod_base = OTHER; note = 2'-O-methylcytidine-3'-phosphate
  misc_feature 1: note = RNA
  misc_feature 2: note = DNA
  misc_feature 3..4: note = RNA
  misc_feature 5: note = DNA
  misc_feature 6: note = RNA
  misc_feature 7: note = DNA
  misc_feature 8..11: note = RNA
  misc_feature 12: note = DNA
  misc_feature 13..23: note = RNA
accaccaccatatctggcacatc

SEQ ID NO: 7589 - DNA, 23 bp, synthetic construct
  source 1..23: mol_type = other DNA
  modified_base 1: mod_base = OTHER; note = 2'-O-methyladenosine-3'-phosphorothioate
  modified_base 2: mod_base = OTHER; note = 2'-deoxythimidine-3'-phosphorothioate
  modified_base 3: mod_base = OTHER; note = 2'-O-methylcytidine-3'-phosphate
  modified_base 4: mod_base = OTHER; note = 2'-O-methylcytidine-3'-phosphate
  modified_base 6: mod_base = OTHER; note = 2'-O-methylcytidine-3'-phosphate
  modified_base 8: mod_base = OTHER; note = 2'-O-methyladenosine-3'-phosphate
  modified_base 9: mod_base = OTHER; note = 2'-O-methylcytidine-3'-phosphate
  modified_base 10: mod_base = OTHER; note = 2'-O-methylcytidine-3'-phosphate
  modified_base 11: mod_base = OTHER; note = 2'-O-methyladenosine-3'-phosphate
  modified_base 13: mod_base = OTHER; note = 2'-O-methyladenosine-3'-phosphate
  modified_base 14: mod_base = OTHER; note = 2'-fluorouridine-3'-phosphate
  modified_base 15: mod_base = OTHER; note = 2'-O-methylcytidine-3'-phosphate
  modified_base 16: mod_base = OTHER; note = 2'-O-methyluridine-3'-phosphate
  modified_base 17: mod_base = OTHER; note = 2'-O-methylguanosine-3'-phosphate
  modified_base 18: mod_base = OTHER; note = 2'-O-methylguanosine-3'-phosphate
  modified_base 19: mod_base = OTHER; note = 2'-O-methylcytidine-3'-phosphate
  modified_base 20: mod_base = OTHER; note = 2'-O-methyladenosine-3'-phosphate
  modified_base 21: mod_base = OTHER; note = 2'-O-methylcytidine-3'-phosphorothioate
  modified_base 22: mod_base = OTHER; note = 2'-O-methyladenosine-3'-phosphorothioate
  modified_base 23: mod_base = OTHER; note = 2'-O-methyluridine-3'-phosphate
  misc_feature 1: note = RNA
  misc_feature 2: note = DNA
  misc_feature 3..4: note = RNA
  misc_feature 5: note = DNA
  misc_feature 6: note = RNA
  misc_feature 7: note = DNA
  misc_feature 8..11: note = RNA
  misc_feature 12: note = DNA
  misc_feature 13..23: note = RNA
atccaccaccatatctggcacat

SEQ ID NO: 7590 - DNA, 23 bp, synthetic construct
  source 1..23: mol_type = other DNA
  modified_base 1: mod_base = OTHER; note = 2'-O-methyladenosine-3'-phosphorothioate
  modified_base 2: mod_base = OTHER; note = 2'-deoxycytidine-3'-phosphorothioate
  modified_base 3: mod_base = OTHER; note = 2'-O-methyluridine-3'-phosphate
  modified_base 4: mod_base = OTHER; note = 2'-O-methylcytidine-3'-phosphate
  modified_base 6: mod_base = OTHER; note = 2'-O-methyladenosine-3'-phosphate
  modified_base 8: mod_base = OTHER; note = 2'-O-methylcytidine-3'-phosphate
  modified_base 9: mod_base = OTHER; note = 2'-O-methyladenosine-3'-phosphate
  modified_base 10: mod_base = OTHER; note = 2'-O-methylcytidine-3'-phosphate
  modified_base 11: mod_base = OTHER; note = 2'-O-methylcytidine-3'-phosphate
  modified_base 13: mod_base = OTHER; note = 2'-O-methyluridine-3'-phosphate
  modified_base 14: mod_base = OTHER; note = 2'-fluoroadenosine-3'-phosphate
  modified_base 15: mod_base = OTHER; note = 2'-O-methyluridine-3'-phosphate
  modified_base 16: mod_base = OTHER; note = 2'-O-methylcytidine-3'-phosphate
  modified_base 17: mod_base = OTHER; note = 2'-O-methyluridine-3'-phosphate
  modified_base 18: mod_base = OTHER; note = 2'-O-methylguanosine-3'-phosphate
  modified_base 19: mod_base = OTHER; note = 2'-O-methylguanosine-3'-phosphate
  modified_base 20: mod_base = OTHER; note = 2'-O-methylcytidine-3'-phosphate
  modified_base 21: mod_base = OTHER; note = 2'-O-methyladenosine-3'-phosphorothioate
  modified_base 22: mod_base = OTHER; note = 2'-O-methylcytidine-3'-phosphorothioate
  modified_base 23: mod_base = OTHER; note = 2'-O-methyladenosine-3'-phosphate
  misc_feature 1: note = RNA
  misc_feature 2: note = DNA
  misc_feature 3..4: note = RNA
  misc_feature 5: note = DNA
  misc_feature 6: note = RNA
  misc_feature 7: note = DNA
  misc_feature 8..11: note = RNA
  misc_feature 12: note = DNA
  misc_feature 13..23: note = RNA
actccaccaccatatctggcaca

SEQ ID NO: 7591 - DNA, 23 bp, synthetic construct
  source 1..23: mol_type = other DNA
  modified_base 1: mod_base = OTHER; note = 2'-O-methyladenosine-3'-phosphorothioate
  modified_base 2: mod_base = OTHER; note = 2'-deoxyguanosine-3'-phosphorothioate
  modified_base 3: mod_base = OTHER; note = 2'-O-methylcytidine-3'-phosphate
  modified_base 4: mod_base = OTHER; note = 2'-O-methylcytidine-3'-phosphate
  modified_base 6: mod_base = OTHER; note = 2'-O-methylcytidine-3'-phosphate
  modified_base 8: mod_base = OTHER; note = 2'-O-methyladenosine-3'-phosphate
  modified_base 9: mod_base = OTHER; note = 2'-O-methylcytidine-3'-phosphate
  modified_base 10: mod_base = OTHER; note = 2'-O-methylcytidine-3'-phosphate
  modified_base 11: mod_base = OTHER; note = 2'-O-methyladenosine-3'-phosphate
  modified_base 13: mod_base = OTHER; note = 2'-O-methylcytidine-3'-phosphate
  modified_base 14: mod_base = OTHER; note = 2'-fluoroadenosine-3'-phosphate
  modified_base 15: mod_base = OTHER; note = 2'-O-methyluridine-3'-phosphate
  modified_base 16: mod_base = OTHER; note = 2'-O-methyladenosine-3'-phosphate
  modified_base 17: mod_base = OTHER; note = 2'-O-methyluridine-3'-phosphate
  modified_base 18: mod_base = OTHER; note = 2'-O-methylcytidine-3'-phosphate
  modified_base 19: mod_base = OTHER; note = 2'-O-methyluridine-3'-phosphate
  modified_base 20: mod_base = OTHER; note = 2'-O-methylguanosine-3'-phosphate
  modified_base 21: mod_base = OTHER; note = 2'-O-methylguanosine-3'-phosphorothioate
  modified_base 22: mod_base = OTHER; note = 2'-O-methylcytidine-3'-phosphorothioate
  modified_base 23: mod_base = OTHER; note = 2'-O-methyladenosine-3'-phosphate
  misc_feature 1: note = RNA
  misc_feature 2: note = DNA
  misc_feature 3..4: note = RNA
  misc_feature 5: note = DNA
  misc_feature 6: note = RNA
  misc_feature 7: note = DNA
  misc_feature 8..11: note = RNA
  misc_feature 12: note = DNA
  misc_feature 13..23: note = RNA
agcctccaccaccatatctggca

SEQ ID NO: 7592 - DNA, 23 bp, synthetic construct
  source 1..23: mol_type = other DNA
  modified_base 1: mod_base = OTHER; note = 2'-O-methyladenosine-3'-phosphorothioate
  modified_base 2: mod_base = OTHER; note = 2'-deoxyguanosine-3'-phosphorothioate
  modified_base 3: mod_base = OTHER; note = 2'-O-methylcytidine-3'-phosphate
  modified_base 4: mod_base = OTHER; note = 2'-O-methylcytidine-3'-phosphate
  modified_base 6: mod_base = OTHER; note = 2'-O-methylcytidine-3'-phosphate
  modified_base 8: mod_base = OTHER; note = 2'-O-methylguanosine-3'-phosphate
  modified_base 9: mod_base = OTHER; note = 2'-O-methylguanosine-3'-phosphate
  modified_base 10: mod_base = OTHER; note = 2'-O-methylcytidine-3'-phosphate
  modified_base 11: mod_base = OTHER; note = 2'-O-methylcytidine-3'-phosphate
  modified_base 13: mod_base = OTHER; note = 2'-O-methylcytidine-3'-phosphate
  modified_base 14: mod_base = OTHER; note = 2'-fluorocytidine-3'-phosphate
  modified_base 15: mod_base = OTHER; note = 2'-O-methyladenosine-3'-phosphate
  modified_base 16: mod_base = OTHER; note = 2'-O-methylcytidine-3'-phosphate
  modified_base 17: mod_base = OTHER; note = 2'-O-methylcytidine-3'-phosphate
  modified_base 18: mod_base = OTHER; note = 2'-O-methyladenosine-3'-phosphate
  modified_base 19: mod_base = OTHER; note = 2'-O-methylcytidine-3'-phosphate
  modified_base 20: mod_base = OTHER; note = 2'-O-methylcytidine-3'-phosphate
  modified_base 21: mod_base = OTHER; note = 2'-O-methyladenosine-3'-phosphorothioate
  modified_base 22: mod_base = OTHER; note = 2'-O-methyluridine-3'-phosphorothioate
  modified_base 23: mod_base = OTHER; note = 2'-O-methyladenosine-3'-phosphate
  misc_feature 1: note = RNA
  misc_feature 2: note = DNA
  misc_feature 3..4: note = RNA
  misc_feature 5: note = DNA
  misc_feature 6: note = RNA
  misc_feature 7: note = DNA
  misc_feature 8..11: note = RNA
  misc_feature 12: note = DNA
  misc_feature 13..23: note = RNA
agccacaggcctccaccaccata

SEQ ID NO: 7593 - DNA, 23 bp, synthetic construct
  source 1..23: mol_type = other DNA
  modified_base 1: mod_base = OTHER; note = 2'-O-methyladenosine-3'-phosphorothioate
  modified_base 2: mod_base = OTHER; note = 2'-deoxyadenosine-3'-phosphorothioate
  modified_base 3: mod_base = OTHER; note = 2'-O-methylguanosine-3'-phosphate
  modified_base 4: mod_base = OTHER; note = 2'-O-methylcytidine-3'-phosphate
  modified_base 6: mod_base = OTHER; note = 2'-O-methyladenosine-3'-phosphate
  modified_base 8: mod_base = OTHER; note = 2'-O-methyladenosine-3'-phosphate
  modified_base 9: mod_base = OTHER; note = 2'-O-methylguanosine-3'-phosphate
  modified_base 10: mod_base = OTHER; note = 2'-O-methylguanosine-3'-phosphate
  modified_base 11: mod_base = OTHER; note = 2'-O-methylcytidine-3'-phosphate
  modified_base 13: mod_base = OTHER; note = 2'-O-methyluridine-3'-phosphate
  modified_base 14: mod_base = OTHER; note = 2'-fluorocytidine-3'-phosphate
  modified_base 15: mod_base = OTHER; note = 2'-O-methylcytidine-3'-phosphate
  modified_base 16: mod_base = OTHER; note = 2'-O-methyladenosine-3'-phosphate
  modified_base 17: mod_base = OTHER; note = 2'-O-methylcytidine-3'-phosphate
  modified_base 18: mod_base = OTHER; note = 2'-O-methylcytidine-3'-phosphate
  modified_base 19: mod_base = OTHER; note = 2'-O-methyladenosine-3'-phosphate
  modified_base 20: mod_base = OTHER; note = 2'-O-methylcytidine-3'-phosphate
  modified_base 21: mod_base = OTHER; note = 2'-O-methylcytidine-3'-phosphorothioate
  modified_base 22: mod_base = OTHER; note = 2'-O-methyladenosine-3'-phosphorothioate
  modified_base 23: mod_base = OTHER; note = 2'-O-methyluridine-3'-phosphate
  misc_feature 1: note = RNA
  misc_feature 2: note = DNA
  misc_feature 3..4: note = RNA
  misc_feature 5: note = DNA
  misc_feature 6: note = RNA
  misc_feature 7: note = DNA
  misc_feature 8..11: note = RNA
  misc_feature 12: note = DNA
  misc_feature 13..23: note = RNA
aagccacaggcctccaccaccat

SEQ ID NO: 7594 - DNA, 23 bp, synthetic construct
  source 1..23: mol_type = other DNA
  modified_base 1: mod_base = OTHER; note = 2'-O-methyladenosine-3'-phosphorothioate
  modified_base 2: mod_base = OTHER; note = 2'-deoxythimidine-3'-phosphorothioate
  modified_base 3: mod_base = OTHER; note = 2'-O-methyladenosine-3'-phosphate
  modified_base 4: mod_base = OTHER; note = 2'-O-methylguanosine-3'-phosphate
  modified_base 6: mod_base = OTHER; note = 2'-O-methyluridine-3'-phosphate
  modified_base 8: mod_base = OTHER; note = 2'-O-methylcytidine-3'-phosphate
  modified_base 9: mod_base = OTHER; note = 2'-O-methyladenosine-3'-phosphate
  modified_base 10: mod_base = OTHER; note = 2'-O-methylguanosine-3'-phosphate
  modified_base 11: mod_base = OTHER; note = 2'-O-methylcytidine-3'-phosphate
  modified_base 13: mod_base = OTHER; note = 2'-O-methyladenosine-3'-phosphate
  modified_base 14: mod_base = OTHER; note = 2'-fluorocytidine-3'-phosphate
  modified_base 15: mod_base = OTHER; note = 2'-O-methyladenosine-3'-phosphate
  modified_base 16: mod_base = OTHER; note = 2'-O-methylguanosine-3'-phosphate
  modified_base 17: mod_base = OTHER; note = 2'-O-methylguanosine-3'-phosphate
  modified_base 18: mod_base = OTHER; note = 2'-O-methylcytidine-3'-phosphate
  modified_base 19: mod_base = OTHER; note = 2'-O-methylcytidine-3'-phosphate
  modified_base 20: mod_base = OTHER; note = 2'-O-methyluridine-3'-phosphate
  modified_base 21: mod_base = OTHER; note = 2'-O-methylcytidine-3'-phosphorothioate
  modified_base 22: mod_base = OTHER; note = 2'-O-methylcytidine-3'-phosphorothioate
  modified_base 23: mod_base = OTHER; note = 2'-O-methyladenosine-3'-phosphate
  misc_feature 1: note = RNA
  misc_feature 2: note = DNA
  misc_feature 3..4: note = RNA
  misc_feature 5: note = DNA
  misc_feature 6: note = RNA
  misc_feature 7: note = DNA
  misc_feature 8..11: note = RNA
  misc_feature 12: note = DNA
  misc_feature 13..23: note = RNA
atagctgcagccacaggcctcca

SEQ ID NO: 7595 - DNA, 23 bp, synthetic construct
  source 1..23: mol_type = other DNA
  modified_base 1: mod_base = OTHER; note = 2'-O-methyladenosine-3'-phosphorothioate
  modified_base 2: mod_base = OTHER; note = 2'-deoxythimidine-3'-phosphorothioate
  modified_base 3: mod_base = OTHER; note = 2'-O-methylguanosine-3'-phosphate
  modified_base 4: mod_base = OTHER; note = 2'-O-methylcytidine-3'-phosphate
  modified_base 6: mod_base = OTHER; note = 2'-O-methyladenosine-3'-phosphate
  modified_base 8: mod_base = OTHER; note = 2'-O-methylcytidine-3'-phosphate
  modified_base 9: mod_base = OTHER; note = 2'-O-methyluridine-3'-phosphate
  modified_base 10: mod_base = OTHER; note = 2'-O-methylguanosine-3'-phosphate
  modified_base 11: mod_base = OTHER; note = 2'-O-methylcytidine-3'-phosphate
  modified_base 13: mod_base = OTHER; note = 2'-O-methylguanosine-3'-phosphate
  modified_base 14: mod_base = OTHER; note = 2'-fluorocytidine-3'-phosphate
  modified_base 15: mod_base = OTHER; note = 2'-O-methylcytidine-3'-phosphate
  modified_base 16: mod_base = OTHER; note = 2'-O-methyladenosine-3'-phosphate
  modified_base 17: mod_base = OTHER; note = 2'-O-methylcytidine-3'-phosphate
  modified_base 18: mod_base = OTHER; note = 2'-O-methyladenosine-3'-phosphate
  modified_base 19: mod_base = OTHER; note = 2'-O-methylguanosine-3'-phosphate
  modified_base 20: mod_base = OTHER; note = 2'-O-methylguanosine-3'-phosphate
  modified_base 21: mod_base = OTHER; note = 2'-O-methylcytidine-3'-phosphorothioate
  modified_base 22: mod_base = OTHER; note = 2'-O-methylcytidine-3'-phosphorothioate
  modified_base 23: mod_base = OTHER; note = 2'-O-methyluridine-3'-phosphate
  misc_feature 1: note = RNA
  misc_feature 2: note = DNA
  misc_feature 3..4: note = RNA
  misc_feature 5: note = DNA
  misc_feature 6: note = RNA
  misc_feature 7: note = DNA
  misc_feature 8..11: note = RNA
  misc_feature 12: note = DNA
  misc_feature 13..23: note = RNA
atgctagctgcagccacaggcct

SEQ ID NO: 7596 - DNA, 23 bp, synthetic construct
  source 1..23: mol_type = other DNA
  modified_base 1: mod_base = OTHER; note = 2'-O-methyladenosine-3'-phosphorothioate
  modified_base 2: mod_base = OTHER; note = 2'-deoxythimidine-3'-phosphorothioate
  modified_base 3: mod_base = OTHER; note = 2'-O-methyluridine-3'-phosphate
  modified_base 4: mod_base = OTHER; note = 2'-O-methylguanosine-3'-phosphate
  modified_base 6: mod_base = OTHER; note = 2'-O-methyluridine-3'-phosphate
  modified_base 8: mod_base = OTHER; note = 2'-O-methylguanosine-3'-phosphate
  modified_base 9: mod_base = OTHER; note = 2'-O-methylcytidine-3'-phosphate
  modified_base 10: mod_base = OTHER; note = 2'-O-methyluridine-3'-phosphate
  modified_base 11: mod_base = OTHER; note = 2'-O-methylguanosine-3'-phosphate
  modified_base 13: mod_base = OTHER; note = 2'-O-methyladenosine-3'-phosphate
  modified_base 14: mod_base = OTHER; note = 2'-fluoroguanosine-3'-phosphate
  modified_base 15: mod_base = OTHER; note = 2'-O-methylcytidine-3'-phosphate
  modified_base 16: mod_base = OTHER; note = 2'-O-methylcytidine-3'-phosphate
  modified_base 17: mod_base = OTHER; note = 2'-O-methyladenosine-3'-phosphate
  modified_base 18: mod_base = OTHER; note = 2'-O-methylcytidine-3'-phosphate
  modified_base 19: mod_base = OTHER; note = 2'-O-methyladenosine-3'-phosphate
  modified_base 20: mod_base = OTHER; note = 2'-O-methylguanosine-3'-phosphate
  modified_base 21: mod_base = OTHER; note = 2'-O-methylguanosine-3'-phosphorothioate
  modified_base 22: mod_base = OTHER; note = 2'-O-methylcytidine-3'-phosphorothioate
  modified_base 23: mod_base = OTHER; note = 2'-O-methylcytidine-3'-phosphate
  misc_feature 1: note = RNA
  misc_feature 2: note = DNA
  misc_feature 3..4: note = RNA
  misc_feature 5: note = DNA
  misc_feature 6: note = RNA
  misc_feature 7: note = DNA
  misc_feature 8..11: note = RNA
  misc_feature 12: note = DNA
  misc_feature 13..23: note = RNA
attgctagctgcagccacaggcc

SEQ ID NO: 7597 - DNA, 23 bp, synthetic construct
  source 1..23: mol_type = other DNA
  modified_base 1: mod_base = OTHER; note = 2'-O-methyladenosine-3'-phosphorothioate
  modified_base 2: mod_base = OTHER; note = 2'-deoxycytidine-3'-phosphorothioate
  modified_base 3: mod_base = OTHER; note = 2'-O-methyluridine-3'-phosphate
  modified_base 4: mod_base = OTHER; note = 2'-O-methyluridine-3'-phosphate
  modified_base 6: mod_base = OTHER; note = 2'-O-methylcytidine-3'-phosphate
  modified_base 8: mod_base = OTHER; note = 2'-O-methyladenosine-3'-phosphate
  modified_base 9: mod_base = OTHER; note = 2'-O-methylguanosine-3'-phosphate
  modified_base 10: mod_base = OTHER; note = 2'-O-methylcytidine-3'-phosphate
  modified_base 11: mod_base = OTHER; note = 2'-O-methyluridine-3'-phosphate
  modified_base 13: mod_base = OTHER; note = 2'-O-methylcytidine-3'-phosphate
  modified_base 14: mod_base = OTHER; note = 2'-fluoroadenosine-3'-phosphate
  modified_base 15: mod_base = OTHER; note = 2'-O-methylguanosine-3'-phosphate
  modified_base 16: mod_base = OTHER; note = 2'-O-methylcytidine-3'-phosphate
  modified_base 17: mod_base = OTHER; note = 2'-O-methylcytidine-3'-phosphate
  modified_base 18: mod_base = OTHER; note = 2'-O-methyladenosine-3'-phosphate
  modified_base 19: mod_base = OTHER; note = 2'-O-methylcytidine-3'-phosphate
  modified_base 20: mod_base = OTHER; note = 2'-O-methyladenosine-3'-phosphate
  modified_base 21: mod_base = OTHER; note = 2'-O-methylguanosine-3'-phosphorothioate
  modified_base 22: mod_base = OTHER; note = 2'-O-methylguanosine-3'-phosphorothioate
  modified_base 23: mod_base = OTHER; note = 2'-O-methylcytidine-3'-phosphate
  misc_feature 1: note = RNA
  misc_feature 2: note = DNA
  misc_feature 3..4: note = RNA
  misc_feature 5: note = DNA
  misc_feature 6: note = RNA
  misc_feature 7: note = DNA
  misc_feature 8..11: note = RNA
  misc_feature 12: note = DNA
  misc_feature 13..23: note = RNA
acttgctagctgcagccacaggc

SEQ ID NO: 7598 - DNA, 23 bp, synthetic construct
  source 1..23: mol_type = other DNA
  modified_base 1: mod_base = OTHER; note = 2'-O-methyladenosine-3'-phosphorothioate
  modified_base 2: mod_base = OTHER; note = 2'-deoxythimidine-3'-phosphorothioate
  modified_base 3: mod_base = OTHER; note = 2'-O-methylcytidine-3'-phosphate
  modified_base 4: mod_base = OTHER; note = 2'-O-methyluridine-3'-phosphate
  modified_base 6: mod_base = OTHER; note = 2'-O-methylguanosine-3'-phosphate
  modified_base 8: mod_base = OTHER; note = 2'-O-methyluridine-3'-phosphate
  modified_base 9: mod_base = OTHER; note = 2'-O-methyladenosine-3'-phosphate
  modified_base 10: mod_base = OTHER; note = 2'-O-methylguanosine-3'-phosphate
  modified_base 11: mod_base = OTHER; note = 2'-O-methylcytidine-3'-phosphate
  modified_base 13: mod_base = OTHER; note = 2'-O-methylguanosine-3'-phosphate
  modified_base 14: mod_base = OTHER; note = 2'-fluorocytidine-3'-phosphate
  modified_base 15: mod_base = OTHER; note = 2'-O-methyladenosine-3'-phosphate
  modified_base 16: mod_base = OTHER; note = 2'-O-methylguanosine-3'-phosphate
  modified_base 17: mod_base = OTHER; note = 2'-O-methylcytidine-3'-phosphate
  modified_base 18: mod_base = OTHER; note = 2'-O-methylcytidine-3'-phosphate
  modified_base 19: mod_base = OTHER; note = 2'-O-methyladenosine-3'-phosphate
  modified_base 20: mod_base = OTHER; note = 2'-O-methylcytidine-3'-phosphate
  modified_base 21: mod_base = OTHER; note = 2'-O-methyladenosine-3'-phosphorothioate
  modified_base 22: mod_base = OTHER; note = 2'-O-methylguanosine-3'-phosphorothioate
  modified_base 23: mod_base = OTHER; note = 2'-O-methylguanosine-3'-phosphate
  misc_feature 1: note = RNA
  misc_feature 2: note = DNA
  misc_feature 3..4: note = RNA
  misc_feature 5: note = DNA
  misc_feature 6: note = RNA
  misc_feature 7: note = DNA
  misc_feature 8..11: note = RNA
  misc_feature 12: note = DNA
  misc_feature 13..23: note = RNA
atcttgctagctgcagccacagg

SEQ ID NO: 7599 - DNA, 23 bp, synthetic construct
  source 1..23: mol_type = other DNA
  modified_base 1: mod_base = OTHER; note = 2'-O-methyladenosine-3'-phosphorothioate
  modified_base 2: mod_base = OTHER; note = 2'-deoxycytidine-3'-phosphorothioate
  modified_base 3: mod_base = OTHER; note = 2'-O-methyluridine-3'-phosphate
  modified_base 4: mod_base = OTHER; note = 2'-O-methylcytidine-3'-phosphate
  modified_base 6: mod_base = OTHER; note = 2'-O-methyluridine-3'-phosphate
  modified_base 8: mod_base = OTHER; note = 2'-O-methylcytidine-3'-phosphate
  modified_base 9: mod_base = OTHER; note = 2'-O-methyluridine-3'-phosphate
  modified_base 10: mod_base = OTHER; note = 2'-O-methyladenosine-3'-phosphate
  modified_base 11: mod_base = OTHER; note = 2'-O-methylguanosine-3'-phosphate
  modified_base 13: mod_base = OTHER; note = 2'-O-methyluridine-3'-phosphate
  modified_base 14: mod_base = OTHER; note = 2'-fluoroguanosine-3'-phosphate
  modified_base 15: mod_base = OTHER; note = 2'-O-methylcytidine-3'-phosphate
  modified_base 16: mod_base = OTHER; note = 2'-O-methyladenosine-3'-phosphate
  modified_base 17: mod_base = OTHER; note = 2'-O-methylguanosine-3'-phosphate
  modified_base 18: mod_base = OTHER; note = 2'-O-methylcytidine-3'-phosphate
  modified_base 19: mod_base = OTHER; note = 2'-O-methylcytidine-3'-phosphate
  modified_base 20: mod_base = OTHER; note = 2'-O-methyladenosine-3'-phosphate
  modified_base 21: mod_base = OTHER; note = 2'-O-methylcytidine-3'-phosphorothioate
  modified_base 22: mod_base = OTHER; note = 2'-O-methyladenosine-3'-phosphorothioate
  modified_base 23: mod_base = OTHER; note = 2'-O-methylguanosine-3'-phosphate
  misc_feature 1: note = RNA
  misc_feature 2: note = DNA
  misc_feature 3..4: note = RNA
  misc_feature 5: note = DNA
  misc_feature 6: note = RNA
  misc_feature 7: note = DNA
  misc_feature 8..11: note = RNA
  misc_feature 12: note = DNA
  misc_feature 13..23: note = RNA
actcttgctagctgcagccacag

SEQ ID NO: 7600 - DNA, 23 bp, synthetic construct
  source 1..23: mol_type = other DNA
  modified_base 1: mod_base = OTHER; note = 2'-O-methyladenosine-3'-phosphorothioate
  modified_base 2: mod_base = OTHER; note = 2'-deoxycytidine-3'-phosphorothioate
  modified_base 3: mod_base = OTHER; note = 2'-O-methylcytidine-3'-phosphate
  modified_base 4: mod_base = OTHER; note = 2'-O-methyluridine-3'-phosphate
  modified_base 6: mod_base = OTHER; note = 2'-O-methyluridine-3'-phosphate
  modified_base 8: mod_base = OTHER; note = 2'-O-methylguanosine-3'-phosphate
  modified_base 9: mod_base = OTHER; note = 2'-O-methylcytidine-3'-phosphate
  modified_base 10: mod_base = OTHER; note = 2'-O-methyluridine-3'-phosphate
  modified_base 11: mod_base = OTHER; note = 2'-O-methyladenosine-3'-phosphate
  modified_base 13: mod_base = OTHER; note = 2'-O-methylcytidine-3'-phosphate
  modified_base 14: mod_base = OTHER; note = 2'-fluorouridine-3'-phosphate
  modified_base 15: mod_base = OTHER; note = 2'-O-methylguanosine-3'-phosphate
  modified_base 16: mod_base = OTHER; note = 2'-O-methylcytidine-3'-phosphate
  modified_base 17: mod_base = OTHER; note = 2'-O-methyladenosine-3'-phosphate
  modified_base 18: mod_base = OTHER; note = 2'-O-methylguanosine-3'-phosphate
  modified_base 19: mod_base = OTHER; note = 2'-O-methylcytidine-3'-phosphate
  modified_base 20: mod_base = OTHER; note = 2'-O-methylcytidine-3'-phosphate
  modified_base 21: mod_base = OTHER; note = 2'-O-methyladenosine-3'-phosphorothioate
  modified_base 22: mod_base = OTHER; note = 2'-O-methylcytidine-3'-phosphorothioate
  modified_base 23: mod_base = OTHER; note = 2'-O-methyladenosine-3'-phosphate
  misc_feature 1: note = RNA
  misc_feature 2: note = DNA
  misc_feature 3..4: note = RNA
  misc_feature 5: note = DNA
  misc_feature 6: note = RNA
  misc_feature 7: note = DNA
  misc_feature 8..11: note = RNA
  misc_feature 12: note = DNA
  misc_feature 13..23: note = RNA
acctcttgctagctgcagccaca

SEQ ID NO: 7601 - DNA, 23 bp, synthetic construct
  source 1..23: mol_type = other DNA
  modified_base 1: mod_base = OTHER; note = 2'-O-methyladenosine-3'-phosphorothioate
  modified_base 2: mod_base = OTHER; note = 2'-deoxythimidine-3'-phosphorothioate
  modified_base 3: mod_base = OTHER; note = 2'-O-methylcytidine-3'-phosphate
  modified_base 4: mod_base = OTHER; note = 2'-O-methylcytidine-3'-phosphate
  modified_base 6: mod_base = OTHER; note = 2'-O-methylcytidine-3'-phosphate
  modified_base 8: mod_base = OTHER; note = 2'-O-methyluridine-3'-phosphate
  modified_base 9: mod_base = OTHER; note = 2'-O-methylguanosine-3'-phosphate
  modified_base 10: mod_base = OTHER; note = 2'-O-methylcytidine-3'-phosphate
  modified_base 11: mod_base = OTHER; note = 2'-O-methyluridine-3'-phosphate
  modified_base 13: mod_base = OTHER; note = 2'-O-methylguanosine-3'-phosphate
  modified_base 14: mod_base = OTHER; note = 2'-fluorocytidine-3'-phosphate
  modified_base 15: mod_base = OTHER; note = 2'-O-methyluridine-3'-phosphate
  modified_base 16: mod_base = OTHER; note = 2'-O-methylguanosine-3'-phosphate
  modified_base 17: mod_base = OTHER; note = 2'-O-methylcytidine-3'-phosphate
  modified_base 18: mod_base = OTHER; note = 2'-O-methyladenosine-3'-phosphate
  modified_base 19: mod_base = OTHER; note = 2'-O-methylguanosine-3'-phosphate
  modified_base 20: mod_base = OTHER; note = 2'-O-methylcytidine-3'-phosphate
  modified_base 21: mod_base = OTHER; note = 2'-O-methylcytidine-3'-phosphorothioate
  modified_base 22: mod_base = OTHER; note = 2'-O-methyladenosine-3'-phosphorothioate
  modified_base 23: mod_base = OTHER; note = 2'-O-methylcytidine-3'-phosphate
  misc_feature 1: note = RNA
  misc_feature 2: note = DNA
  misc_feature 3..4: note = RNA
  misc_feature 5: note = DNA
  misc_feature 6: note = RNA
  misc_feature 7: note = DNA
  misc_feature 8..11: note = RNA
  misc_feature 12: note = DNA
  misc_feature 13..23: note = RNA
atcctcttgctagctgcagccac

SEQ ID NO: 7602 - DNA, 23 bp, synthetic construct
  source 1..23: mol_type = other DNA
  modified_base 1: mod_base = OTHER; note = 2'-O-methyladenosine-3'-phosphorothioate
  modified_base 2: mod_base = OTHER; note = 2'-deoxyguanosine-3'-phosphorothioate
  modified_base 3: mod_base = OTHER; note = 2'-O-methyluridine-3'-phosphate
  modified_base 4: mod_base = OTHER; note = 2'-O-methylcytidine-3'-phosphate
  modified_base 6: mod_base = OTHER; note = 2'-O-methyluridine-3'-phosphate
  modified_base 8: mod_base = OTHER; note = 2'-O-methyluridine-3'-phosphate
  modified_base 9: mod_base = OTHER; note = 2'-O-methyluridine-3'-phosphate
  modified_base 10: mod_base = OTHER; note = 2'-O-methylguanosine-3'-phosphate
  modified_base 11: mod_base = OTHER; note = 2'-O-methylcytidine-3'-phosphate
  modified_base 13: mod_base = OTHER; note = 2'-O-methyladenosine-3'-phosphate
  modified_base 14: mod_base = OTHER; note = 2'-fluoroguanosine-3'-phosphate
  modified_base 15: mod_base = OTHER; note = 2'-O-methylcytidine-3'-phosphate
  modified_base 16: mod_base = OTHER; note = 2'-O-methyluridine-3'-phosphate
  modified_base 17: mod_base = OTHER; note = 2'-O-methylguanosine-3'-phosphate
  modified_base 18: mod_base = OTHER; note = 2'-O-methylcytidine-3'-phosphate
  modified_base 19: mod_base = OTHER; note = 2'-O-methyladenosine-3'-phosphate
  modified_base 20: mod_base = OTHER; note = 2'-O-methylguanosine-3'-phosphate
  modified_base 21: mod_base = OTHER; note = 2'-O-methylcytidine-3'-phosphorothioate
  modified_base 22: mod_base = OTHER; note = 2'-O-methylcytidine-3'-phosphorothioate
  modified_base 23: mod_base = OTHER; note = 2'-O-methyladenosine-3'-phosphate
  misc_feature 1: note = RNA
  misc_feature 2: note = DNA
  misc_feature 3..4: note = RNA
  misc_feature 5: note = DNA
  misc_feature 6: note = RNA
  misc_feature 7: note = DNA
  misc_feature 8..11: note = RNA
  misc_feature 12: note = DNA
  misc_feature 13..23: note = RNA
agtcctcttgctagctgcagcca

SEQ ID NO: 7603 - DNA, 23 bp, synthetic construct
  source 1..23: mol_type = other DNA
  modified_base 1: mod_base = OTHER; note = 2'-O-methyladenosine-3'-phosphorothioate
  modified_base 2: mod_base = OTHER; note = 2'-deoxyguanosine-3'-phosphorothioate
  modified_base 3: mod_base = OTHER; note = 2'-O-methylguanosine-3'-phosphate
  modified_base 4: mod_base = OTHER; note = 2'-O-methyluridine-3'-phosphate
  modified_base 6: mod_base = OTHER; note = 2'-O-methylcytidine-3'-phosphate
  modified_base 8: mod_base = OTHER; note = 2'-O-methylcytidine-3'-phosphate
  modified_base 9: mod_base = OTHER; note = 2'-O-methyluridine-3'-phosphate
  modified_base 10: mod_base = OTHER; note = 2'-O-methyluridine-3'-phosphate
  modified_base 11: mod_base = OTHER; note = 2'-O-methylguanosine-3'-phosphate
  modified_base 13: mod_base = OTHER; note = 2'-O-methyluridine-3'-phosphate
  modified_base 14: mod_base = OTHER; note = 2'-fluoroadenosine-3'-phosphate
  modified_base 15: mod_base = OTHER; note = 2'-O-methylguanosine-3'-phosphate
  modified_base 16: mod_base = OTHER; note = 2'-O-methylcytidine-3'-phosphate
  modified_base 17: mod_base = OTHER; note = 2'-O-methyluridine-3'-phosphate
  modified_base 18: mod_base = OTHER; note = 2'-O-methylguanosine-3'-phosphate
  modified_base 19: mod_base = OTHER; note = 2'-O-methylcytidine-3'-phosphate
  modified_base 20: mod_base = OTHER; note = 2'-O-methyladenosine-3'-phosphate
  modified_base 21: mod_base = OTHER; note = 2'-O-methylguanosine-3'-phosphorothioate
  modified_base 22: mod_base = OTHER; note = 2'-O-methylcytidine-3'-phosphorothioate
  modified_base 23: mod_base = OTHER; note = 2'-O-methylcytidine-3'-phosphate
  misc_feature 1: note = RNA
  misc_feature 2: note = DNA
  misc_feature 3..4: note = RNA
  misc_feature 5: note = DNA
  misc_feature 6: note = RNA
  misc_feature 7: note = DNA
  misc_feature 8..11: note = RNA
  misc_feature 12: note = DNA
  misc_feature 13..23: note = RNA
aggtcctcttgctagctgcagcc

SEQ ID NO: 7604 - DNA, 23 bp, synthetic construct
  source 1..23: mol_type = other DNA
  modified_base 1: mod_base = OTHER; note = 2'-O-methyladenosine-3'-phosphorothioate
  modified_base 2: mod_base = OTHER; note = 2'-deoxyadenosine-3'-phosphorothioate
  modified_base 3: mod_base = OTHER; note = 2'-O-methylguanosine-3'-phosphate
  modified_base 4: mod_base = OTHER; note = 2'-O-methylguanosine-3'-phosphate
  modified_base 6: mod_base = OTHER; note = 2'-O-methylcytidine-3'-phosphate
  modified_base 8: mod_base = OTHER; note = 2'-O-methyluridine-3'-phosphate
  modified_base 9: mod_base = OTHER; note = 2'-O-methylcytidine-3'-phosphate
  modified_base 10: mod_base = OTHER; note = 2'-O-methyluridine-3'-phosphate
  modified_base 11: mod_base = OTHER; note = 2'-O-methyluridine-3'-phosphate
  modified_base 13: mod_base = OTHER; note = 2'-O-methylcytidine-3'-phosphate
  modified_base 14: mod_base = OTHER; note = 2'-fluorouridine-3'-phosphate
  modified_base 15: mod_base = OTHER; note = 2'-O-methyladenosine-3'-phosphate
  modified_base 16: mod_base = OTHER; note = 2'-O-methylguanosine-3'-phosphate
  modified_base 17: mod_base = OTHER; note = 2'-O-methylcytidine-3'-phosphate
  modified_base 18: mod_base = OTHER; note = 2'-O-methyluridine-3'-phosphate
  modified_base 19: mod_base = OTHER; note = 2'-O-methylguanosine-3'-phosphate
  modified_base 20: mod_base = OTHER; note = 2'-O-methylcytidine-3'-phosphate
  modified_base 21: mod_base = OTHER; note = 2'-O-methyladenosine-3'-phosphorothioate
  modified_base 22: mod_base = OTHER; note = 2'-O-methylguanosine-3'-phosphorothioate
  modified_base 23: mod_base = OTHER; note = 2'-O-methylcytidine-3'-phosphate
  misc_feature 1: note = RNA
  misc_feature 2: note = DNA
  misc_feature 3..4: note = RNA
  misc_feature 5: note = DNA
  misc_feature 6: note = RNA
  misc_feature 7: note = DNA
  misc_feature 8..11: note = RNA
  misc_feature 12: note = DNA
  misc_feature 13..23: note = RNA
aaggtcctcttgctagctgcagc

SEQ ID NO: 7605 - DNA, 23 bp, synthetic construct
  source 1..23: mol_type = other DNA
  modified_base 1: mod_base = OTHER; note = 2'-O-methyladenosine-3'-phosphorothioate
  modified_base 2: mod_base = OTHER; note = 2'-deoxycytidine-3'-phosphorothioate
  modified_base 3: mod_base = OTHER; note = 2'-O-methyladenosine-3'-phosphate
  modified_base 4: mod_base = OTHER; note = 2'-O-methylguanosine-3'-phosphate
  modified_base 6: mod_base = OTHER; note = 2'-O-methyluridine-3'-phosphate
  modified_base 8: mod_base = OTHER; note = 2'-O-methylcytidine-3'-phosphate
  modified_base 9: mod_base = OTHER; note = 2'-O-methyluridine-3'-phosphate
  modified_base 10: mod_base = OTHER; note = 2'-O-methylcytidine-3'-phosphate
  modified_base 11: mod_base = OTHER; note = 2'-O-methyluridine-3'-phosphate
  modified_base 13: mod_base = OTHER; note = 2'-O-methylguanosine-3'-phosphate
  modified_base 14: mod_base = OTHER; note = 2'-fluorocytidine-3'-phosphate
  modified_base 15: mod_base = OTHER; note = 2'-O-methyluridine-3'-phosphate
  modified_base 16: mod_base = OTHER; note = 2'-O-methyladenosine-3'-phosphate
  modified_base 17: mod_base = OTHER; note = 2'-O-methylguanosine-3'-phosphate
  modified_base 18: mod_base = OTHER; note = 2'-O-methylcytidine-3'-phosphate
  modified_base 19: mod_base = OTHER; note = 2'-O-methyluridine-3'-phosphate
  modified_base 20: mod_base = OTHER; note = 2'-O-methylguanosine-3'-phosphate
  modified_base 21: mod_base = OTHER; note = 2'-O-methylcytidine-3'-phosphorothioate
  modified_base 22: mod_base = OTHER; note = 2'-O-methyladenosine-3'-phosphorothioate
  modified_base 23: mod_base = OTHER; note = 2'-O-methylguanosine-3'-phosphate
  misc_feature 1: note = RNA
  misc_feature 2: note = DNA
  misc_feature 3..4: note = RNA
  misc_feature 5: note = DNA
  misc_feature 6: note = RNA
  misc_feature 7: note = DNA
  misc_feature 8..11: note = RNA
  misc_feature 12: note = DNA
  misc_feature 13..23: note = RNA
acaggtcctcttgctagctgcag

SEQ ID NO: 7606 - DNA, 23 bp, synthetic construct
  source 1..23: mol_type = other DNA
  modified_base 1: mod_base = OTHER; note = 2'-O-methyladenosine-3'-phosphorothioate
  modified_base 2: mod_base = OTHER; note = 2'-deoxycytidine-3'-phosphorothioate
  modified_base 3: mod_base = OTHER; note = 2'-O-methylcytidine-3'-phosphate
  modified_base 4: mod_base = OTHER; note = 2'-O-methyladenosine-3'-phosphate
  modified_base 6: mod_base = OTHER; note = 2'-O-methylguanosine-3'-phosphate
  modified_base 8: mod_base = OTHER; note = 2'-O-methylcytidine-3'-phosphate
  modified_base 9: mod_base = OTHER; note = 2'-O-methylcytidine-3'-phosphate
  modified_base 10: mod_base = OTHER; note = 2'-O-methyluridine-3'-phosphate
  modified_base 11: mod_base = OTHER; note = 2'-O-methylcytidine-3'-phosphate
  modified_base 13: mod_base = OTHER; note = 2'-O-methyluridine-3'-phosphate
  modified_base 14: mod_base = OTHER; note = 2'-fluoroguanosine-3'-phosphate
  modified_base 15: mod_base = OTHER; note = 2'-O-methylcytidine-3'-phosphate
  modified_base 16: mod_base = OTHER; note = 2'-O-methyluridine-3'-phosphate
  modified_base 17: mod_base = OTHER; note = 2'-O-methyladenosine-3'-phosphate
  modified_base 18: mod_base = OTHER; note = 2'-O-methylguanosine-3'-phosphate
  modified_base 19: mod_base = OTHER; note = 2'-O-methylcytidine-3'-phosphate
  modified_base 20: mod_base = OTHER; note = 2'-O-methyluridine-3'-phosphate
  modified_base 21: mod_base = OTHER; note = 2'-O-methylguanosine-3'-phosphorothioate
  modified_base 22: mod_base = OTHER; note = 2'-O-methylcytidine-3'-phosphorothioate
  modified_base 23: mod_base = OTHER; note = 2'-O-methyladenosine-3'-phosphate
  misc_feature 1: note = RNA
  misc_feature 2: note = DNA
  misc_feature 3..4: note = RNA
  misc_feature 5: note = DNA
  misc_feature 6: note = RNA
  misc_feature 7: note = DNA
  misc_feature 8..11: note = RNA
  misc_feature 12: note = DNA
  misc_feature 13..23: note = RNA
accaggtcctcttgctagctgca

SEQ ID NO: 7607 - DNA, 23 bp, synthetic construct
  source 1..23: mol_type = other DNA
  modified_base 1: mod_base = OTHER; note = 2'-O-methyladenosine-3'-phosphorothioate
  modified_base 2: mod_base = OTHER; note = 2'-deoxythimidine-3'-phosphorothioate
  modified_base 3: mod_base = OTHER; note = 2'-O-methylguanosine-3'-phosphate
  modified_base 4: mod_base = OTHER; note = 2'-O-methylguanosine-3'-phosphate
  modified_base 6: mod_base = OTHER; note = 2'-O-methylcytidine-3'-phosphate
  modified_base 8: mod_base = OTHER; note = 2'-O-methylcytidine-3'-phosphate
  modified_base 9: mod_base = OTHER; note = 2'-O-methyluridine-3'-phosphate
  modified_base 10: mod_base = OTHER; note = 2'-O-methyluridine-3'-phosphate
  modified_base 11: mod_base = OTHER; note = 2'-O-methylcytidine-3'-phosphate
  modified_base 13: mod_base = OTHER; note = 2'-O-methylcytidine-3'-phosphate
  modified_base 14: mod_base = OTHER; note = 2'-fluorouridine-3'-phosphate
  modified_base 15: mod_base = OTHER; note = 2'-O-methylcytidine-3'-phosphate
  modified_base 16: mod_base = OTHER; note = 2'-O-methylcytidine-3'-phosphate
  modified_base 17: mod_base = OTHER; note = 2'-O-methyladenosine-3'-phosphate
  modified_base 18: mod_base = OTHER; note = 2'-O-methyladenosine-3'-phosphate
  modified_base 19: mod_base = OTHER; note = 2'-O-methyladenosine-3'-phosphate
  modified_base 20: mod_base = OTHER; note = 2'-O-methylguanosine-3'-phosphate
  modified_base 21: mod_base = OTHER; note = 2'-O-methylcytidine-3'-phosphorothioate
  modified_base 22: mod_base = OTHER; note = 2'-O-methylcytidine-3'-phosphorothioate
  modified_base 23: mod_base = OTHER; note = 2'-O-methylcytidine-3'-phosphate
  misc_feature 1: note = RNA
  misc_feature 2: note = DNA
  misc_feature 3..4: note = RNA
  misc_feature 5: note = DNA
  misc_feature 6: note = RNA
  misc_feature 7: note = DNA
  misc_feature 8..11: note = RNA
  misc_feature 12: note = DNA
  misc_feature 13..23: note = RNA
atggtctcttcactccaaagccc

SEQ ID NO: 7608 - DNA, 23 bp, synthetic construct
  source 1..23: mol_type = other DNA
  modified_base 1: mod_base = OTHER; note = 2'-O-methyladenosine-3'-phosphorothioate
  modified_base 2: mod_base = OTHER; note = 2'-deoxythimidine-3'-phosphorothioate
  modified_base 3: mod_base = OTHER; note = 2'-O-methyluridine-3'-phosphate
  modified_base 4: mod_base = OTHER; note = 2'-O-methylguanosine-3'-phosphate
  modified_base 6: mod_base = OTHER; note = 2'-O-methyluridine-3'-phosphate
  modified_base 8: mod_base = OTHER; note = 2'-O-methyluridine-3'-phosphate
  modified_base 9: mod_base = OTHER; note = 2'-O-methylcytidine-3'-phosphate
  modified_base 10: mod_base = OTHER; note = 2'-O-methyluridine-3'-phosphate
  modified_base 11: mod_base = OTHER; note = 2'-O-methyluridine-3'-phosphate
  modified_base 13: mod_base = OTHER; note = 2'-O-methyladenosine-3'-phosphate
  modified_base 14: mod_base = OTHER; note = 2'-fluorocytidine-3'-phosphate
  modified_base 15: mod_base = OTHER; note = 2'-O-methyluridine-3'-phosphate
  modified_base 16: mod_base = OTHER; note = 2'-O-methylcytidine-3'-phosphate
  modified_base 17: mod_base = OTHER; note = 2'-O-methylcytidine-3'-phosphate
  modified_base 18: mod_base = OTHER; note = 2'-O-methyladenosine-3'-phosphate
  modified_base 19: mod_base = OTHER; note = 2'-O-methyladenosine-3'-phosphate
  modified_base 20: mod_base = OTHER; note = 2'-O-methyladenosine-3'-phosphate
  modified_base 21: mod_base = OTHER; note = 2'-O-methylguanosine-3'-phosphorothioate
  modified_base 22: mod_base = OTHER; note = 2'-O-methylcytidine-3'-phosphorothioate
  modified_base 23: mod_base = OTHER; note = 2'-O-methylcytidine-3'-phosphate
  misc_feature 1: note = RNA
  misc_feature 2: note = DNA
  misc_feature 3..4: note = RNA
  misc_feature 5: note = DNA
  misc_feature 6: note = RNA
  misc_feature 7: note = DNA
  misc_feature 8..11: note = RNA
  misc_feature 12: note = DNA
  misc_feature 13..23: note = RNA
attggtctcttcactccaaagcc

SEQ ID NO: 7609 - DNA, 23 bp, synthetic construct
  source 1..23: mol_type = other DNA
  modified_base 1: mod_base = OTHER; note = 2'-O-methyladenosine-3'-phosphorothioate
  modified_base 2: mod_base = OTHER; note = 2'-deoxycytidine-3'-phosphorothioate
  modified_base 3: mod_base = OTHER; note = 2'-O-methyluridine-3'-phosphate
  modified_base 4: mod_base = OTHER; note = 2'-O-methyluridine-3'-phosphate
  modified_base 6: mod_base = OTHER; note = 2'-O-methylguanosine-3'-phosphate
  modified_base 8: mod_base = OTHER; note = 2'-O-methylcytidine-3'-phosphate
  modified_base 9: mod_base = OTHER; note = 2'-O-methyluridine-3'-phosphate
  modified_base 10: mod_base = OTHER; note = 2'-O-methylcytidine-3'-phosphate
  modified_base 11: mod_base = OTHER; note = 2'-O-methyluridine-3'-phosphate
  modified_base 13: mod_base = OTHER; note = 2'-O-methylcytidine-3'-phosphate
  modified_base 14: mod_base = OTHER; note = 2'-fluoroadenosine-3'-phosphate
  modified_base 15: mod_base = OTHER; note = 2'-O-methylcytidine-3'-phosphate
  modified_base 16: mod_base = OTHER; note = 2'-O-methyluridine-3'-phosphate
  modified_base 17: mod_base = OTHER; note = 2'-O-methylcytidine-3'-phosphate
  modified_base 18: mod_base = OTHER; note = 2'-O-methylcytidine-3'-phosphate
  modified_base 19: mod_base = OTHER; note = 2'-O-methyladenosine-3'-phosphate
  modified_base 20: mod_base = OTHER; note = 2'-O-methyladenosine-3'-phosphate
  modified_base 21: mod_base = OTHER; note = 2'-O-methyladenosine-3'-phosphorothioate
  modified_base 22: mod_base = OTHER; note = 2'-O-methylguanosine-3'-phosphorothioate
  modified_base 23: mod_base = OTHER; note = 2'-O-methylcytidine-3'-phosphate
  misc_feature 1: note = RNA
  misc_feature 2: note = DNA
  misc_feature 3..4: note = RNA
  misc_feature 5: note = DNA
  misc_feature 6: note = RNA
  misc_feature 7: note = DNA
  misc_feature 8..11: note = RNA
  misc_feature 12: note = DNA
  misc_feature 13..23: note = RNA
acttggtctcttcactccaaagc

SEQ ID NO: 7610 - DNA, 23 bp, synthetic construct
  source 1..23: mol_type = other DNA
  modified_base 1: mod_base = OTHER; note = 2'-O-methyladenosine-3'-phosphorothioate
  modified_base 2: mod_base = OTHER; note = 2'-deoxyadenosine-3'-phosphorothioate
  modified_base 3: mod_base = OTHER; note = 2'-O-methyluridine-3'-phosphate
  modified_base 4: mod_base = OTHER; note = 2'-O-methylcytidine-3'-phosphate
  modified_base 6: mod_base = OTHER; note = 2'-O-methyluridine-3'-phosphate
  modified_base 8: mod_base = OTHER; note = 2'-O-methylguanosine-3'-phosphate
  modified_base 9: mod_base = OTHER; note = 2'-O-methyluridine-3'-phosphate
  modified_base 10: mod_base = OTHER; note = 2'-O-methylcytidine-3'-phosphate
  modified_base 11: mod_base = OTHER; note = 2'-O-methyluridine-3'-phosphate
  modified_base 13: mod_base = OTHER; note = 2'-O-methyluridine-3'-phosphate
  modified_base 14: mod_base = OTHER; note = 2'-fluorouridine-3'-phosphate
  modified_base 15: mod_base = OTHER; note = 2'-O-methylcytidine-3'-phosphate
  modified_base 16: mod_base = OTHER; note = 2'-O-methyladenosine-3'-phosphate
  modified_base 17: mod_base = OTHER; note = 2'-O-methylcytidine-3'-phosphate
  modified_base 18: mod_base = OTHER; note = 2'-O-methyluridine-3'-phosphate
  modified_base 19: mod_base = OTHER; note = 2'-O-methylcytidine-3'-phosphate
  modified_base 20: mod_base = OTHER; note = 2'-O-methylcytidine-3'-phosphate
  modified_base 21: mod_base = OTHER; note = 2'-O-methyladenosine-3'-phosphorothioate
  modified_base 22: mod_base = OTHER; note = 2'-O-methyladenosine-3'-phosphorothioate
  modified_base 23: mod_base = OTHER; note = 2'-O-methyladenosine-3'-phosphate
  misc_feature 1: note = RNA
  misc_feature 2: note = DNA
  misc_feature 3..4: note = RNA
  misc_feature 5: note = DNA
  misc_feature 6: note = RNA
  misc_feature 7: note = DNA
  misc_feature 8..11: note = RNA
  misc_feature 12: note = DNA
  misc_feature 13..23: note = RNA
aatcttggtctcttcactccaaa

SEQ ID NO: 7611 - DNA, 23 bp, synthetic construct
  source 1..23: mol_type = other DNA
  modified_base 1: mod_base = OTHER; note = 2'-O-methyladenosine-3'-phosphorothioate
  modified_base 2: mod_base = OTHER; note = 2'-deoxycytidine-3'-phosphorothioate
  modified_base 3: mod_base = OTHER; note = 2'-O-methyladenosine-3'-phosphate
  modified_base 4: mod_base = OTHER; note = 2'-O-methyluridine-3'-phosphate
  modified_base 6: mod_base = OTHER; note = 2'-O-methyluridine-3'-phosphate
  modified_base 8: mod_base = OTHER; note = 2'-O-methylguanosine-3'-phosphate
  modified_base 9: mod_base = OTHER; note = 2'-O-methylguanosine-3'-phosphate
  modified_base 10: mod_base = OTHER; note = 2'-O-methyluridine-3'-phosphate
  modified_base 11: mod_base = OTHER; note = 2'-O-methylcytidine-3'-phosphate
  modified_base 13: mod_base = OTHER; note = 2'-O-methylcytidine-3'-phosphate
  modified_base 14: mod_base = OTHER; note = 2'-fluorouridine-3'-phosphate
  modified_base 15: mod_base = OTHER; note = 2'-O-methyluridine-3'-phosphate
  modified_base 16: mod_base = OTHER; note = 2'-O-methylcytidine-3'-phosphate
  modified_base 17: mod_base = OTHER; note = 2'-O-methyladenosine-3'-phosphate
  modified_base 18: mod_base = OTHER; note = 2'-O-methylcytidine-3'-phosphate
  modified_base 19: mod_base = OTHER; note = 2'-O-methyluridine-3'-phosphate
  modified_base 20: mod_base = OTHER; note = 2'-O-methylcytidine-3'-phosphate
  modified_base 21: mod_base = OTHER; note = 2'-O-methylcytidine-3'-phosphorothioate
  modified_base 22: mod_base = OTHER; note = 2'-O-methyladenosine-3'-phosphorothioate
  modified_base 23: mod_base = OTHER; note = 2'-O-methyladenosine-3'-phosphate
  misc_feature 1: note = RNA
  misc_feature 2: note = DNA
  misc_feature 3..4: note = RNA
  misc_feature 5: note = DNA
  misc_feature 6: note = RNA
  misc_feature 7: note = DNA
  misc_feature 8..11: note = RNA
  misc_feature 12: note = DNA
  misc_feature 13..23: note = RNA
acatcttggtctcttcactccaa

SEQ ID NO: 7612 - DNA, 23 bp, synthetic construct
  source 1..23: mol_type = other DNA
  modified_base 1: mod_base = OTHER; note = 2'-O-methyladenosine-3'-phosphorothioate
  modified_base 2: mod_base = OTHER; note = 2'-deoxythimidine-3'-phosphorothioate
  modified_base 3: mod_base = OTHER; note = 2'-O-methylcytidine-3'-phosphate
  modified_base 4: mod_base = OTHER; note = 2'-O-methyladenosine-3'-phosphate
  modified_base 6: mod_base = OTHER; note = 2'-O-methylcytidine-3'-phosphate
  modified_base 8: mod_base = OTHER; note = 2'-O-methyluridine-3'-phosphate
  modified_base 9: mod_base = OTHER; note = 2'-O-methylguanosine-3'-phosphate
  modified_base 10: mod_base = OTHER; note = 2'-O-methylguanosine-3'-phosphate
  modified_base 11: mod_base = OTHER; note = 2'-O-methyluridine-3'-phosphate
  modified_base 13: mod_base = OTHER; note = 2'-O-methyluridine-3'-phosphate
  modified_base 14: mod_base = OTHER; note = 2'-fluorocytidine-3'-phosphate
  modified_base 15: mod_base = OTHER; note = 2'-O-methyluridine-3'-phosphate
  modified_base 16: mod_base = OTHER; note = 2'-O-methyluridine-3'-phosphate
  modified_base 17: mod_base = OTHER; note = 2'-O-methylcytidine-3'-phosphate
  modified_base 18: mod_base = OTHER; note = 2'-O-methyladenosine-3'-phosphate
  modified_base 19: mod_base = OTHER; note = 2'-O-methylcytidine-3'-phosphate
  modified_base 20: mod_base = OTHER; note = 2'-O-methyluridine-3'-phosphate
  modified_base 21: mod_base = OTHER; note = 2'-O-methylcytidine-3'-phosphorothioate
  modified_base 22: mod_base = OTHER; note = 2'-O-methylcytidine-3'-phosphorothioate
  modified_base 23: mod_base = OTHER; note = 2'-O-methyladenosine-3'-phosphate
  misc_feature 1: note = RNA
  misc_feature 2: note = DNA
  misc_feature 3..4: note = RNA
  misc_feature 5: note = DNA
  misc_feature 6: note = RNA
  misc_feature 7: note = DNA
  misc_feature 8..11: note = RNA
  misc_feature 12: note = DNA
  misc_feature 13..23: note = RNA
atcatcttggtctcttcactcca

SEQ ID NO: 7613 - DNA, 23 bp, synthetic construct
  source 1..23: mol_type = other DNA
  modified_base 1: mod_base = OTHER; note = 2'-O-methyladenosine-3'-phosphorothioate
  modified_base 2: mod_base = OTHER; note = 2'-deoxyadenosine-3'-phosphorothioate
  modified_base 3: mod_base = OTHER; note = 2'-O-methylcytidine-3'-phosphate
  modified_base 4: mod_base = OTHER; note = 2'-O-methyluridine-3'-phosphate
  modified_base 6: mod_base = OTHER; note = 2'-O-methylcytidine-3'-phosphate
  modified_base 8: mod_base = OTHER; note = 2'-O-methyluridine-3'-phosphate
  modified_base 9: mod_base = OTHER; note = 2'-O-methylcytidine-3'-phosphate
  modified_base 10: mod_base = OTHER; note = 2'-O-methyluridine-3'-phosphate
  modified_base 11: mod_base = OTHER; note = 2'-O-methyluridine-3'-phosphate
  modified_base 13: mod_base = OTHER; note = 2'-O-methylguanosine-3'-phosphate
  modified_base 14: mod_base = OTHER; note = 2'-fluorouridine-3'-phosphate
  modified_base 15: mod_base = OTHER; note = 2'-O-methylcytidine-3'-phosphate
  modified_base 16: mod_base = OTHER; note = 2'-O-methyluridine-3'-phosphate
  modified_base 17: mod_base = OTHER; note = 2'-O-methylcytidine-3'-phosphate
  modified_base 18: mod_base = OTHER; note = 2'-O-methyluridine-3'-phosphate
  modified_base 19: mod_base = OTHER; note = 2'-O-methyluridine-3'-phosphate
  modified_base 20: mod_base = OTHER; note = 2'-O-methylcytidine-3'-phosphate
  modified_base 21: mod_base = OTHER; note = 2'-O-methyladenosine-3'-phosphorothioate
  modified_base 22: mod_base = OTHER; note = 2'-O-methylcytidine-3'-phosphorothioate
  modified_base 23: mod_base = OTHER; note = 2'-O-methyluridine-3'-phosphate
  misc_feature 1: note = RNA
  misc_feature 2: note = DNA
  misc_feature 3..4: note = RNA
  misc_feature 5: note = DNA
  misc_feature 6: note = RNA
  misc_feature 7: note = DNA
  misc_feature 8..11: note = RNA
  misc_feature 12: note = DNA
  misc_feature 13..23: note = RNA
aacttcatcttggtctcttcact

SEQ ID NO: 7614 - DNA, 23 bp, synthetic construct
  source 1..23: mol_type = other DNA
  modified_base 1: mod_base = OTHER; note = 2'-O-methyladenosine-3'-phosphorothioate
  modified_base 2: mod_base = OTHER; note = 2'-deoxyadenosine-3'-phosphorothioate
  modified_base 3: mod_base = OTHER; note = 2'-O-methyladenosine-3'-phosphate
  modified_base 4: mod_base = OTHER; note = 2'-O-methyladenosine-3'-phosphate
  modified_base 6: mod_base = OTHER; note = 2'-O-methyluridine-3'-phosphate
  modified_base 8: mod_base = OTHER; note = 2'-O-methylcytidine-3'-phosphate
  modified_base 9: mod_base = OTHER; note = 2'-O-methyladenosine-3'-phosphate
  modified_base 10: mod_base = OTHER; note = 2'-O-methyluridine-3'-phosphate
  modified_base 11: mod_base = OTHER; note = 2'-O-methylcytidine-3'-phosphate
  modified_base 13: mod_base = OTHER; note = 2'-O-methyluridine-3'-phosphate
  modified_base 14: mod_base = OTHER; note = 2'-fluoroguanosine-3'-phosphate
  modified_base 15: mod_base = OTHER; note = 2'-O-methylguanosine-3'-phosphate
  modified_base 16: mod_base = OTHER; note = 2'-O-methyluridine-3'-phosphate
  modified_base 17: mod_base = OTHER; note = 2'-O-methylcytidine-3'-phosphate
  modified_base 18: mod_base = OTHER; note = 2'-O-methyluridine-3'-phosphate
  modified_base 19: mod_base = OTHER; note = 2'-O-methylcytidine-3'-phosphate
  modified_base 20: mod_base = OTHER; note = 2'-O-methyluridine-3'-phosphate
  modified_base 21: mod_base = OTHER; note = 2'-O-methyluridine-3'-phosphorothioate
  modified_base 22: mod_base = OTHER; note = 2'-O-methylcytidine-3'-phosphorothioate
  modified_base 23: mod_base = OTHER; note = 2'-O-methyladenosine-3'-phosphate
  misc_feature 1: note = RNA
  misc_feature 2: note = DNA
  misc_feature 3..4: note = RNA
  misc_feature 5: note = DNA
  misc_feature 6: note = RNA
  misc_feature 7: note = DNA
  misc_feature 8..11: note = RNA
  misc_feature 12: note = DNA
  misc_feature 13..23: note = RNA
aaaacttcatcttggtctcttca

SEQ ID NO: 7615 - DNA, 23 bp, synthetic construct
  source 1..23: mol_type = other DNA
  modified_base 1: mod_base = OTHER; note = 2'-O-methyladenosine-3'-phosphorothioate
  modified_base 2: mod_base = OTHER; note = 2'-deoxyguanosine-3'-phosphorothioate
  modified_base 3: mod_base = OTHER; note = 2'-O-methyladenosine-3'-phosphate
  modified_base 4: mod_base = OTHER; note = 2'-O-methyladenosine-3'-phosphate
  modified_base 6: mod_base = OTHER; note = 2'-O-methylcytidine-3'-phosphate
  modified_base 8: mod_base = OTHER; note = 2'-O-methyluridine-3'-phosphate
  modified_base 9: mod_base = OTHER; note = 2'-O-methylcytidine-3'-phosphate
  modified_base 10: mod_base = OTHER; note = 2'-O-methyladenosine-3'-phosphate
  modified_base 11: mod_base = OTHER; note = 2'-O-methyluridine-3'-phosphate
  modified_base 13: mod_base = OTHER; note = 2'-O-methyluridine-3'-phosphate
  modified_base 14: mod_base = OTHER; note = 2'-fluorouridine-3'-phosphate
  modified_base 15: mod_base = OTHER; note = 2'-O-methylguanosine-3'-phosphate
  modified_base 16: mod_base = OTHER; note = 2'-O-methylguanosine-3'-phosphate
  modified_base 17: mod_base = OTHER; note = 2'-O-methyluridine-3'-phosphate
  modified_base 18: mod_base = OTHER; note = 2'-O-methylcytidine-3'-phosphate
  modified_base 19: mod_base = OTHER; note = 2'-O-methyluridine-3'-phosphate
  modified_base 20: mod_base = OTHER; note = 2'-O-methylcytidine-3'-phosphate
  modified_base 21: mod_base = OTHER; note = 2'-O-methyluridine-3'-phosphorothioate
  modified_base 22: mod_base = OTHER; note = 2'-O-methyluridine-3'-phosphorothioate
  modified_base 23: mod_base = OTHER; note = 2'-O-methylcytidine-3'-phosphate
  misc_feature 1: note = RNA
  misc_feature 2: note = DNA
  misc_feature 3..4: note = RNA
  misc_feature 5: note = DNA
  misc_feature 6: note = RNA
  misc_feature 7: note = DNA
  misc_feature 8..11: note = RNA
  misc_feature 12: note = DNA
  misc_feature 13..23: note = RNA
agaaacttcatcttggtctcttc

SEQ ID NO: 7616 - DNA, 23 bp, synthetic construct
  source 1..23: mol_type = other DNA
  modified_base 1: mod_base = OTHER; note = 2'-O-methyladenosine-3'-phosphorothioate
  modified_base 2: mod_base = OTHER; note = 2'-deoxyguanosine-3'-phosphorothioate
  modified_base 3: mod_base = OTHER; note = 2'-O-methylguanosine-3'-phosphate
  modified_base 4: mod_base = OTHER; note = 2'-O-methyladenosine-3'-phosphate
  modified_base 6: mod_base = OTHER; note = 2'-O-methyladenosine-3'-phosphate
  modified_base 8: mod_base = OTHER; note = 2'-O-methyluridine-3'-phosphate
  modified_base 9: mod_base = OTHER; note = 2'-O-methyluridine-3'-phosphate
  modified_base 10: mod_base = OTHER; note = 2'-O-methylcytidine-3'-phosphate
  modified_base 11: mod_base = OTHER; note = 2'-O-methyladenosine-3'-phosphate
  modified_base 13: mod_base = OTHER; note = 2'-O-methylcytidine-3'-phosphate
  modified_base 14: mod_base = OTHER; note = 2'-fluorouridine-3'-phosphate
  modified_base 15: mod_base = OTHER; note = 2'-O-methyluridine-3'-phosphate
  modified_base 16: mod_base = OTHER; note = 2'-O-methylguanosine-3'-phosphate
  modified_base 17: mod_base = OTHER; note = 2'-O-methylguanosine-3'-phosphate
  modified_base 18: mod_base = OTHER; note = 2'-O-methyluridine-3'-phosphate
  modified_base 19: mod_base = OTHER; note = 2'-O-methylcytidine-3'-phosphate
  modified_base 20: mod_base = OTHER; note = 2'-O-methyluridine-3'-phosphate
  modified_base 21: mod_base = OTHER; note = 2'-O-methylcytidine-3'-phosphorothioate
  modified_base 22: mod_base = OTHER; note = 2'-O-methyluridine-3'-phosphorothioate
  modified_base 23: mod_base = OTHER; note = 2'-O-methyluridine-3'-phosphate
  misc_feature 1: note = RNA
  misc_feature 2: note = DNA
  misc_feature 3..4: note = RNA
  misc_feature 5: note = DNA
  misc_feature 6: note = RNA
  misc_feature 7: note = DNA
  misc_feature 8..11: note = RNA
  misc_feature 12: note = DNA
  misc_feature 13..23: note = RNA
aggaaacttcatcttggtctctt

SEQ ID NO: 7617 - DNA, 23 bp, synthetic construct
  source 1..23: mol_type = other DNA
  modified_base 1: mod_base = OTHER; note = 2'-O-methyladenosine-3'-phosphorothioate
  modified_base 2: mod_base = OTHER; note = 2'-deoxyguanosine-3'-phosphorothioate
  modified_base 3: mod_base = OTHER; note = 2'-O-methylguanosine-3'-phosphate
  modified_base 4: mod_base = OTHER; note = 2'-O-methylguanosine-3'-phosphate
  modified_base 6: mod_base = OTHER; note = 2'-O-methyladenosine-3'-phosphate
  modified_base 8: mod_base = OTHER; note = 2'-O-methylcytidine-3'-phosphate
  modified_base 9: mod_base = OTHER; note = 2'-O-methyluridine-3'-phosphate
  modified_base 10: mod_base = OTHER; note = 2'-O-methyluridine-3'-phosphate
  modified_base 11: mod_base = OTHER; note = 2'-O-methylcytidine-3'-phosphate
  modified_base 13: mod_base = OTHER; note = 2'-O-methyluridine-3'-phosphate
  modified_base 14: mod_base = OTHER; note = 2'-fluorocytidine-3'-phosphate
  modified_base 15: mod_base = OTHER; note = 2'-O-methyluridine-3'-phosphate
  modified_base 16: mod_base = OTHER; note = 2'-O-methyluridine-3'-phosphate
  modified_base 17: mod_base = OTHER; note = 2'-O-methylguanosine-3'-phosphate
  modified_base 18: mod_base = OTHER; note = 2'-O-methylguanosine-3'-phosphate
  modified_base 19: mod_base = OTHER; note = 2'-O-methyluridine-3'-phosphate
  modified_base 20: mod_base = OTHER; note = 2'-O-methylcytidine-3'-phosphate
  modified_base 21: mod_base = OTHER; note = 2'-O-methyluridine-3'-phosphorothioate
  modified_base 22: mod_base = OTHER; note = 2'-O-methylcytidine-3'-phosphorothioate
  modified_base 23: mod_base = OTHER; note = 2'-O-methyluridine-3'-phosphate
  misc_feature 1: note = RNA
  misc_feature 2: note = DNA
  misc_feature 3..4: note = RNA
  misc_feature 5: note = DNA
  misc_feature 6: note = RNA
  misc_feature 7: note = DNA
  misc_feature 8..11: note = RNA
  misc_feature 12: note = DNA
  misc_feature 13..23: note = RNA
agggaaacttcatcttggtctct

SEQ ID NO: 7618 - DNA, 23 bp, synthetic construct
  source 1..23: mol_type = other DNA
  modified_base 1: mod_base = OTHER; note = 2'-O-methyladenosine-3'-phosphorothioate
  modified_base 2: mod_base = OTHER; note = 2'-deoxythimidine-3'-phosphorothioate
  modified_base 3: mod_base = OTHER; note = 2'-O-methylguanosine-3'-phosphate
  modified_base 4: mod_base = OTHER; note = 2'-O-methylguanosine-3'-phosphate
  modified_base 6: mod_base = OTHER; note = 2'-O-methyladenosine-3'-phosphate
  modified_base 8: mod_base = OTHER; note = 2'-O-methyladenosine-3'-phosphate
  modified_base 9: mod_base = OTHER; note = 2'-O-methylcytidine-3'-phosphate
  modified_base 10: mod_base = OTHER; note = 2'-O-methyluridine-3'-phosphate
  modified_base 11: mod_base = OTHER; note = 2'-O-methyluridine-3'-phosphate
  modified_base 13: mod_base = OTHER; note = 2'-O-methyladenosine-3'-phosphate
  modified_base 14: mod_base = OTHER; note = 2'-fluorouridine-3'-phosphate
  modified_base 15: mod_base = OTHER; note = 2'-O-methylcytidine-3'-phosphate
  modified_base 16: mod_base = OTHER; note = 2'-O-methyluridine-3'-phosphate
  modified_base 17: mod_base = OTHER; note = 2'-O-methyluridine-3'-phosphate
  modified_base 18: mod_base = OTHER; note = 2'-O-methylguanosine-3'-phosphate
  modified_base 19: mod_base = OTHER; note = 2'-O-methylguanosine-3'-phosphate
  modified_base 20: mod_base = OTHER; note = 2'-O-methyluridine-3'-phosphate
  modified_base 21: mod_base = OTHER; note = 2'-O-methylcytidine-3'-phosphorothioate
  modified_base 22: mod_base = OTHER; note = 2'-O-methyluridine-3'-phosphorothioate
  modified_base 23: mod_base = OTHER; note = 2'-O-methylcytidine-3'-phosphate
  misc_feature 1: note = RNA
  misc_feature 2: note = DNA
  misc_feature 3..4: note = RNA
  misc_feature 5: note = DNA
  misc_feature 6: note = RNA
  misc_feature 7: note = DNA
  misc_feature 8..11: note = RNA
  misc_feature 12: note = DNA
  misc_feature 13..23: note = RNA
atgggaaacttcatcttggtctc

SEQ ID NO: 7619 - DNA, 23 bp, synthetic construct
  source 1..23: mol_type = other DNA
  modified_base 1: mod_base = OTHER; note = 2'-O-methyladenosine-3'-phosphorothioate
  modified_base 2: mod_base = OTHER; note = 2'-deoxycytidine-3'-phosphorothioate
  modified_base 3: mod_base = OTHER; note = 2'-O-methyluridine-3'-phosphate
  modified_base 4: mod_base = OTHER; note = 2'-O-methylguanosine-3'-phosphate
  modified_base 6: mod_base = OTHER; note = 2'-O-methylguanosine-3'-phosphate
  modified_base 8: mod_base = OTHER; note = 2'-O-methyladenosine-3'-phosphate
  modified_base 9: mod_base = OTHER; note = 2'-O-methyladenosine-3'-phosphate
  modified_base 10: mod_base = OTHER; note = 2'-O-methylcytidine-3'-phosphate
  modified_base 11: mod_base = OTHER; note = 2'-O-methyluridine-3'-phosphate
  modified_base 13: mod_base = OTHER; note = 2'-O-methylcytidine-3'-phosphate
  modified_base 14: mod_base = OTHER; note = 2'-fluoroadenosine-3'-phosphate
  modified_base 15: mod_base = OTHER; note = 2'-O-methyluridine-3'-phosphate
  modified_base 16: mod_base = OTHER; note = 2'-O-methylcytidine-3'-phosphate
  modified_base 17: mod_base = OTHER; note = 2'-O-methyluridine-3'-phosphate
  modified_base 18: mod_base = OTHER; note = 2'-O-methyluridine-3'-phosphate
  modified_base 19: mod_base = OTHER; note = 2'-O-methylguanosine-3'-phosphate
  modified_base 20: mod_base = OTHER; note = 2'-O-methylguanosine-3'-phosphate
  modified_base 21: mod_base = OTHER; note = 2'-O-methyluridine-3'-phosphorothioate
  modified_base 22: mod_base = OTHER; note = 2'-O-methylcytidine-3'-phosphorothioate
  modified_base 23: mod_base = OTHER; note = 2'-O-methyluridine-3'-phosphate
  misc_feature 1: note = RNA
  misc_feature 2: note = DNA
  misc_feature 3..4: note = RNA
  misc_feature 5: note = DNA
  misc_feature 6: note = RNA
  misc_feature 7: note = DNA
  misc_feature 8..11: note = RNA
  misc_feature 12: note = DNA
  misc_feature 13..23: note = RNA
actgggaaacttcatcttggtct

SEQ ID NO: 7620 - DNA, 23 bp, synthetic construct
  source 1..23: mol_type = other DNA
  modified_base 1: mod_base = OTHER; note = 2'-O-methyladenosine-3'-phosphorothioate
  modified_base 2: mod_base = OTHER; note = 2'-deoxycytidine-3'-phosphorothioate
  modified_base 3: mod_base = OTHER; note = 2'-O-methylcytidine-3'-phosphate
  modified_base 4: mod_base = OTHER; note = 2'-O-methyluridine-3'-phosphate
  modified_base 6: mod_base = OTHER; note = 2'-O-methylguanosine-3'-phosphate
  modified_base 8: mod_base = OTHER; note = 2'-O-methyladenosine-3'-phosphate
  modified_base 9: mod_base = OTHER; note = 2'-O-methyladenosine-3'-phosphate
  modified_base 10: mod_base = OTHER; note = 2'-O-methyladenosine-3'-phosphate
  modified_base 11: mod_base = OTHER; note = 2'-O-methylcytidine-3'-phosphate
  modified_base 13: mod_base = OTHER; note = 2'-O-methyluridine-3'-phosphate
  modified_base 14: mod_base = OTHER; note = 2'-fluorocytidine-3'-phosphate
  modified_base 15: mod_base = OTHER; note = 2'-O-methyladenosine-3'-phosphate
  modified_base 16: mod_base = OTHER; note = 2'-O-methyluridine-3'-phosphate
  modified_base 17: mod_base = OTHER; note = 2'-O-methylcytidine-3'-phosphate
  modified_base 18: mod_base = OTHER; note = 2'-O-methyluridine-3'-phosphate
  modified_base 19: mod_base = OTHER; note = 2'-O-methyluridine-3'-phosphate
  modified_base 20: mod_base = OTHER; note = 2'-O-methylguanosine-3'-phosphate
  modified_base 21: mod_base = OTHER; note = 2'-O-methylguanosine-3'-phosphorothioate
  modified_base 22: mod_base = OTHER; note = 2'-O-methyluridine-3'-phosphorothioate
  modified_base 23: mod_base = OTHER; note = 2'-O-methylcytidine-3'-phosphate
  misc_feature 1: note = RNA
  misc_feature 2: note = DNA
  misc_feature 3..4: note = RNA
  misc_feature 5: note = DNA
  misc_feature 6: note = RNA
  misc_feature 7: note = DNA
  misc_feature 8..11: note = RNA
  misc_feature 12: note = DNA
  misc_feature 13..23: note = RNA
acctgggaaacttcatcttggtc

SEQ ID NO: 7621 - DNA, 23 bp, synthetic construct
  source 1..23: mol_type = other DNA
  modified_base 1: mod_base = OTHER; note = 2'-O-methyladenosine-3'-phosphorothioate
  modified_base 2: mod_base = OTHER; note = 2'-deoxyguanosine-3'-phosphorothioate
  modified_base 3: mod_base = OTHER; note = 2'-O-methylcytidine-3'-phosphate
  modified_base 4: mod_base = OTHER; note = 2'-O-methylcytidine-3'-phosphate
  modified_base 6: mod_base = OTHER; note = 2'-O-methylguanosine-3'-phosphate
  modified_base 8: mod_base = OTHER; note = 2'-O-methylguanosine-3'-phosphate
  modified_base 9: mod_base = OTHER; note = 2'-O-methyladenosine-3'-phosphate
  modified_base 10: mod_base = OTHER; note = 2'-O-methyladenosine-3'-phosphate
  modified_base 11: mod_base = OTHER; note = 2'-O-methyladenosine-3'-phosphate
  modified_base 13: mod_base = OTHER; note = 2'-O-methyluridine-3'-phosphate
  modified_base 14: mod_base = OTHER; note = 2'-fluorouridine-3'-phosphate
  modified_base 15: mod_base = OTHER; note = 2'-O-methylcytidine-3'-phosphate
  modified_base 16: mod_base = OTHER; note = 2'-O-methyladenosine-3'-phosphate
  modified_base 17: mod_base = OTHER; note = 2'-O-methyluridine-3'-phosphate
  modified_base 18: mod_base = OTHER; note = 2'-O-methylcytidine-3'-phosphate
  modified_base 19: mod_base = OTHER; note = 2'-O-methyluridine-3'-phosphate
  modified_base 20: mod_base = OTHER; note = 2'-O-methyluridine-3'-phosphate
  modified_base 21: mod_base = OTHER; note = 2'-O-methylguanosine-3'-phosphorothioate
  modified_base 22: mod_base = OTHER; note = 2'-O-methylguanosine-3'-phosphorothioate
  modified_base 23: mod_base = OTHER; note = 2'-O-methyluridine-3'-phosphate
  misc_feature 1: note = RNA
  misc_feature 2: note = DNA
  misc_feature 3..4: note = RNA
  misc_feature 5: note = DNA
  misc_feature 6: note = RNA
  misc_feature 7: note = DNA
  misc_feature 8..11: note = RNA
  misc_feature 12: note = DNA
  misc_feature 13..23: note = RNA
agcctgggaaacttcatcttggt

SEQ ID NO: 7622 - DNA, 23 bp, synthetic construct
  source 1..23: mol_type = other DNA
  modified_base 1: mod_base = OTHER; note = 2'-O-methyladenosine-3'-phosphorothioate
  modified_base 2: mod_base = OTHER; note = 2'-deoxythimidine-3'-phosphorothioate
  modified_base 3: mod_base = OTHER; note = 2'-O-methylguanosine-3'-phosphate
  modified_base 4: mod_base = OTHER; note = 2'-O-methylcytidine-3'-phosphate
  modified_base 6: mod_base = OTHER; note = 2'-O-methyluridine-3'-phosphate
  modified_base 8: mod_base = OTHER; note = 2'-O-methylguanosine-3'-phosphate
  modified_base 9: mod_base = OTHER; note = 2'-O-methylguanosine-3'-phosphate
  modified_base 10: mod_base = OTHER; note = 2'-O-methyladenosine-3'-phosphate
  modified_base 11: mod_base = OTHER; note = 2'-O-methyladenosine-3'-phosphate
  modified_base 13: mod_base = OTHER; note = 2'-O-methylcytidine-3'-phosphate
  modified_base 14: mod_base = OTHER; note = 2'-fluorouridine-3'-phosphate
  modified_base 15: mod_base = OTHER; note = 2'-O-methyluridine-3'-phosphate
  modified_base 16: mod_base = OTHER; note = 2'-O-methylcytidine-3'-phosphate
  modified_base 17: mod_base = OTHER; note = 2'-O-methyladenosine-3'-phosphate
  modified_base 18: mod_base = OTHER; note = 2'-O-methyluridine-3'-phosphate
  modified_base 19: mod_base = OTHER; note = 2'-O-methylcytidine-3'-phosphate
  modified_base 20: mod_base = OTHER; note = 2'-O-methyluridine-3'-phosphate
  modified_base 21: mod_base = OTHER; note = 2'-O-methyluridine-3'-phosphorothioate
  modified_base 22: mod_base = OTHER; note = 2'-O-methylguanosine-3'-phosphorothioate
  modified_base 23: mod_base = OTHER; note = 2'-O-methylguanosine-3'-phosphate
  misc_feature 1: note = RNA
  misc_feature 2: note = DNA
  misc_feature 3..4: note = RNA
  misc_feature 5: note = DNA
  misc_feature 6: note = RNA
  misc_feature 7: note = DNA
  misc_feature 8..11: note = RNA
  misc_feature 12: note = DNA
  misc_feature 13..23: note = RNA
atgcctgggaaacttcatcttgg

SEQ ID NO: 7623 - DNA, 23 bp, synthetic construct
  source 1..23: mol_type = other DNA
  modified_base 1: mod_base = OTHER; note = 2'-O-methyladenosine-3'-phosphorothioate
  modified_base 2: mod_base = OTHER; note = 2'-deoxyguanosine-3'-phosphorothioate
  modified_base 3: mod_base = OTHER; note = 2'-O-methyluridine-3'-phosphate
  modified_base 4: mod_base = OTHER; note = 2'-O-methylguanosine-3'-phosphate
  modified_base 6: mod_base = OTHER; note = 2'-O-methylcytidine-3'-phosphate
  modified_base 8: mod_base = OTHER; note = 2'-O-methylguanosine-3'-phosphate
  modified_base 9: mod_base = OTHER; note = 2'-O-methylguanosine-3'-phosphate
  modified_base 10: mod_base = OTHER; note = 2'-O-methylguanosine-3'-phosphate
  modified_base 11: mod_base = OTHER; note = 2'-O-methyladenosine-3'-phosphate
  modified_base 13: mod_base = OTHER; note = 2'-O-methyladenosine-3'-phosphate
  modified_base 14: mod_base = OTHER; note = 2'-fluorocytidine-3'-phosphate
  modified_base 15: mod_base = OTHER; note = 2'-O-methyluridine-3'-phosphate
  modified_base 16: mod_base = OTHER; note = 2'-O-methyluridine-3'-phosphate
  modified_base 17: mod_base = OTHER; note = 2'-O-methylcytidine-3'-phosphate
  modified_base 18: mod_base = OTHER; note = 2'-O-methyladenosine-3'-phosphate
  modified_base 19: mod_base = OTHER; note = 2'-O-methyluridine-3'-phosphate
  modified_base 20: mod_base = OTHER; note = 2'-O-methylcytidine-3'-phosphate
  modified_base 21: mod_base = OTHER; note = 2'-O-methyluridine-3'-phosphorothioate
  modified_base 22: mod_base = OTHER; note = 2'-O-methyluridine-3'-phosphorothioate
  modified_base 23: mod_base = OTHER; note = 2'-O-methylguanosine-3'-phosphate
  misc_feature 1: note = RNA
  misc_feature 2: note = DNA
  misc_feature 3..4: note = RNA
  misc_feature 5: note = DNA
  misc_feature 6: note = RNA
  misc_feature 7: note = DNA
  misc_feature 8..11: note = RNA
  misc_feature 12: note = DNA
  misc_feature 13..23: note = RNA
agtgcctgggaaacttcatcttg

SEQ ID NO: 7624 - DNA, 23 bp, synthetic construct
  source 1..23: mol_type = other DNA
  modified_base 1: mod_base = OTHER; note = 2'-O-methyladenosine-3'-phosphorothioate
  modified_base 2: mod_base = OTHER; note = 2'-deoxythimidine-3'-phosphorothioate
  modified_base 3: mod_base = OTHER; note = 2'-O-methylguanosine-3'-phosphate
  modified_base 4: mod_base = OTHER; note = 2'-O-methyluridine-3'-phosphate
  modified_base 6: mod_base = OTHER; note = 2'-O-methylcytidine-3'-phosphate
  modified_base 8: mod_base = OTHER; note = 2'-O-methyluridine-3'-phosphate
  modified_base 9: mod_base = OTHER; note = 2'-O-methylguanosine-3'-phosphate
  modified_base 10: mod_base = OTHER; note = 2'-O-methylguanosine-3'-phosphate
  modified_base 11: mod_base = OTHER; note = 2'-O-methylguanosine-3'-phosphate
  modified_base 13: mod_base = OTHER; note = 2'-O-methyladenosine-3'-phosphate
  modified_base 14: mod_base = OTHER; note = 2'-fluoroadenosine-3'-phosphate
  modified_base 15: mod_base = OTHER; note = 2'-O-methylcytidine-3'-phosphate
  modified_base 16: mod_base = OTHER; note = 2'-O-methyluridine-3'-phosphate
  modified_base 17: mod_base = OTHER; note = 2'-O-methyluridine-3'-phosphate
  modified_base 18: mod_base = OTHER; note = 2'-O-methylcytidine-3'-phosphate
  modified_base 19: mod_base = OTHER; note = 2'-O-methyladenosine-3'-phosphate
  modified_base 20: mod_base = OTHER; note = 2'-O-methyluridine-3'-phosphate
  modified_base 21: mod_base = OTHER; note = 2'-O-methylcytidine-3'-phosphorothioate
  modified_base 22: mod_base = OTHER; note = 2'-O-methyluridine-3'-phosphorothioate
  modified_base 23: mod_base = OTHER; note = 2'-O-methyluridine-3'-phosphate
  misc_feature 1: note = RNA
  misc_feature 2: note = DNA
  misc_feature 3..4: note = RNA
  misc_feature 5: note = DNA
  misc_feature 6: note = RNA
  misc_feature 7: note = DNA
  misc_feature 8..11: note = RNA
  misc_feature 12: note = DNA
  misc_feature 13..23: note = RNA
atgtgcctgggaaacttcatctt

SEQ ID NO: 7625 - DNA, 23 bp, synthetic construct
  source 1..23: mol_type = other DNA
  modified_base 1: mod_base = OTHER; note = 2'-O-methyladenosine-3'-phosphorothioate
  modified_base 2: mod_base = OTHER; note = 2'-deoxycytidine-3'-phosphorothioate
  modified_base 3: mod_base = OTHER; note = 2'-O-methyluridine-3'-phosphate
  modified_base 4: mod_base = OTHER; note = 2'-O-methylguanosine-3'-phosphate
  modified_base 6: mod_base = OTHER; note = 2'-O-methylguanosine-3'-phosphate
  modified_base 8: mod_base = OTHER; note = 2'-O-methylcytidine-3'-phosphate
  modified_base 9: mod_base = OTHER; note = 2'-O-methyluridine-3'-phosphate
  modified_base 10: mod_base = OTHER; note = 2'-O-methylguanosine-3'-phosphate
  modified_base 11: mod_base = OTHER; note = 2'-O-methylguanosine-3'-phosphate
  modified_base 13: mod_base = OTHER; note = 2'-O-methyladenosine-3'-phosphate
  modified_base 14: mod_base = OTHER; note = 2'-fluoroadenosine-3'-phosphate
  modified_base 15: mod_base = OTHER; note = 2'-O-methyladenosine-3'-phosphate
  modified_base 16: mod_base = OTHER; note = 2'-O-methylcytidine-3'-phosphate
  modified_base 17: mod_base = OTHER; note = 2'-O-methyluridine-3'-phosphate
  modified_base 18: mod_base = OTHER; note = 2'-O-methyluridine-3'-phosphate
  modified_base 19: mod_base = OTHER; note = 2'-O-methylcytidine-3'-phosphate
  modified_base 20: mod_base = OTHER; note = 2'-O-methyladenosine-3'-phosphate
  modified_base 21: mod_base = OTHER; note = 2'-O-methyluridine-3'-phosphorothioate
  modified_base 22: mod_base = OTHER; note = 2'-O-methylcytidine-3'-phosphorothioate
  modified_base 23: mod_base = OTHER; note = 2'-O-methyluridine-3'-phosphate
  misc_feature 1: note = RNA
  misc_feature 2: note = DNA
  misc_feature 3..4: note = RNA
  misc_feature 5: note = DNA
  misc_feature 6: note = RNA
  misc_feature 7: note = DNA
  misc_feature 8..11: note = RNA
  misc_feature 12: note = DNA
  misc_feature 13..23: note = RNA
actgtgcctgggaaacttcatct

SEQ ID NO: 7626 - DNA, 23 bp, synthetic construct
  source 1..23: mol_type = other DNA
  modified_base 1: mod_base = OTHER; note = 2'-O-methyladenosine-3'-phosphorothioate
  modified_base 2: mod_base = OTHER; note = 2'-deoxycytidine-3'-phosphorothioate
  modified_base 3: mod_base = OTHER; note = 2'-O-methylcytidine-3'-phosphate
  modified_base 4: mod_base = OTHER; note = 2'-O-methylcytidine-3'-phosphate
  modified_base 6: mod_base = OTHER; note = 2'-O-methylguanosine-3'-phosphate
  modified_base 8: mod_base = OTHER; note = 2'-O-methylguanosine-3'-phosphate
  modified_base 9: mod_base = OTHER; note = 2'-O-methylcytidine-3'-phosphate
  modified_base 10: mod_base = OTHER; note = 2'-O-methylcytidine-3'-phosphate
  modified_base 11: mod_base = OTHER; note = 2'-O-methyluridine-3'-phosphate
  modified_base 13: mod_base = OTHER; note = 2'-O-methylguanosine-3'-phosphate
  modified_base 14: mod_base = OTHER; note = 2'-fluoroguanosine-3'-phosphate
  modified_base 15: mod_base = OTHER; note = 2'-O-methyladenosine-3'-phosphate
  modified_base 16: mod_base = OTHER; note = 2'-O-methyladenosine-3'-phosphate
  modified_base 17: mod_base = OTHER; note = 2'-O-methyladenosine-3'-phosphate
  modified_base 18: mod_base = OTHER; note = 2'-O-methylcytidine-3'-phosphate
  modified_base 19: mod_base = OTHER; note = 2'-O-methyluridine-3'-phosphate
  modified_base 20: mod_base = OTHER; note = 2'-O-methyluridine-3'-phosphate
  modified_base 21: mod_base = OTHER; note = 2'-O-methylcytidine-3'-phosphorothioate
  modified_base 22: mod_base = OTHER; note = 2'-O-methyladenosine-3'-phosphorothioate
  modified_base 23: mod_base = OTHER; note = 2'-O-methyluridine-3'-phosphate
  misc_feature 1: note = RNA
  misc_feature 2: note = DNA
  misc_feature 3..4: note = RNA
  misc_feature 5: note = DNA
  misc_feature 6: note = RNA
  misc_feature 7: note = DNA
  misc_feature 8..11: note = RNA
  misc_feature 12: note = DNA
  misc_feature 13..23: note = RNA
accctgtgcctgggaaacttcat

SEQ ID NO: 7627 - DNA, 23 bp, synthetic construct
  source 1..23: mol_type = other DNA
  modified_base 1: mod_base = OTHER; note = 2'-O-methyladenosine-3'-phosphorothioate
  modified_base 2: mod_base = OTHER; note = 2'-deoxyguanosine-3'-phosphorothioate
  modified_base 3: mod_base = OTHER; note = 2'-O-methylcytidine-3'-phosphate
  modified_base 4: mod_base = OTHER; note = 2'-O-methylcytidine-3'-phosphate
  modified_base 6: mod_base = OTHER; note = 2'-O-methyluridine-3'-phosphate
  modified_base 8: mod_base = OTHER; note = 2'-O-methyluridine-3'-phosphate
  modified_base 9: mod_base = OTHER; note = 2'-O-methylguanosine-3'-phosphate
  modified_base 10: mod_base = OTHER; note = 2'-O-methylcytidine-3'-phosphate
  modified_base 11: mod_base = OTHER; note = 2'-O-methylcytidine-3'-phosphate
  modified_base 13: mod_base = OTHER; note = 2'-O-methylguanosine-3'-phosphate
  modified_base 14: mod_base = OTHER; note = 2'-fluoroguanosine-3'-phosphate
  modified_base 15: mod_base = OTHER; note = 2'-O-methylguanosine-3'-phosphate
  modified_base 16: mod_base = OTHER; note = 2'-O-methyladenosine-3'-phosphate
  modified_base 17: mod_base = OTHER; note = 2'-O-methyladenosine-3'-phosphate
  modified_base 18: mod_base = OTHER; note = 2'-O-methyladenosine-3'-phosphate
  modified_base 19: mod_base = OTHER; note = 2'-O-methylcytidine-3'-phosphate
  modified_base 20: mod_base = OTHER; note = 2'-O-methyluridine-3'-phosphate
  modified_base 21: mod_base = OTHER; note = 2'-O-methyluridine-3'-phosphorothioate
  modified_base 22: mod_base = OTHER; note = 2'-O-methylcytidine-3'-phosphorothioate
  modified_base 23: mod_base = OTHER; note = 2'-O-methyladenosine-3'-phosphate
  misc_feature 1: note = RNA
  misc_feature 2: note = DNA
  misc_feature 3..4: note = RNA
  misc_feature 5: note = DNA
  misc_feature 6: note = RNA
  misc_feature 7: note = DNA
  misc_feature 8..11: note = RNA
  misc_feature 12: note = DNA
  misc_feature 13..23: note = RNA
agccctgtgcctgggaaacttca

SEQ ID NO: 7628 - DNA, 23 bp, synthetic construct
  source 1..23: mol_type = other DNA
  modified_base 1: mod_base = OTHER; note = 2'-O-methyladenosine-3'-phosphorothioate
  modified_base 2: mod_base = OTHER; note = 2'-deoxyadenosine-3'-phosphorothioate
  modified_base 3: mod_base = OTHER; note = 2'-O-methyluridine-3'-phosphate
  modified_base 4: mod_base = OTHER; note = 2'-O-methylguanosine-3'-phosphate
  modified_base 6: mod_base = OTHER; note = 2'-O-methylcytidine-3'-phosphate
  modified_base 8: mod_base = OTHER; note = 2'-O-methyluridine-3'-phosphate
  modified_base 9: mod_base = OTHER; note = 2'-O-methylguanosine-3'-phosphate
  modified_base 10: mod_base = OTHER; note = 2'-O-methyluridine-3'-phosphate
  modified_base 11: mod_base = OTHER; note = 2'-O-methylguanosine-3'-phosphate
  modified_base 13: mod_base = OTHER; note = 2'-O-methylcytidine-3'-phosphate
  modified_base 14: mod_base = OTHER; note = 2'-fluorouridine-3'-phosphate
  modified_base 15: mod_base = OTHER; note = 2'-O-methylguanosine-3'-phosphate
  modified_base 16: mod_base = OTHER; note = 2'-O-methylguanosine-3'-phosphate
  modified_base 17: mod_base = OTHER; note = 2'-O-methylguanosine-3'-phosphate
  modified_base 18: mod_base = OTHER; note = 2'-O-methyladenosine-3'-phosphate
  modified_base 19: mod_base = OTHER; note = 2'-O-methyladenosine-3'-phosphate
  modified_base 20: mod_base = OTHER; note = 2'-O-methyladenosine-3'-phosphate
  modified_base 21: mod_base = OTHER; note = 2'-O-methylcytidine-3'-phosphorothioate
  modified_base 22: mod_base = OTHER; note = 2'-O-methyluridine-3'-phosphorothioate
  modified_base 23: mod_base = OTHER; note = 2'-O-methyluridine-3'-phosphate
  misc_feature 1: note = RNA
  misc_feature 2: note = DNA
  misc_feature 3..4: note = RNA
  misc_feature 5: note = DNA
  misc_feature 6: note = RNA
  misc_feature 7: note = DNA
  misc_feature 8..11: note = RNA
  misc_feature 12: note = DNA
  misc_feature 13..23: note = RNA
aatgccctgtgcctgggaaactt

SEQ ID NO: 7629 - DNA, 23 bp, synthetic construct
  source 1..23: mol_type = other DNA
  modified_base 1: mod_base = OTHER; note = 2'-O-methyladenosine-3'-phosphorothioate
  modified_base 2: mod_base = OTHER; note = 2'-deoxyguanosine-3'-phosphorothioate
  modified_base 3: mod_base = OTHER; note = 2'-O-methyladenosine-3'-phosphate
  modified_base 4: mod_base = OTHER; note = 2'-O-methyluridine-3'-phosphate
  modified_base 6: mod_base = OTHER; note = 2'-O-methylcytidine-3'-phosphate
  modified_base 8: mod_base = OTHER; note = 2'-O-methylcytidine-3'-phosphate
  modified_base 9: mod_base = OTHER; note = 2'-O-methyluridine-3'-phosphate
  modified_base 10: mod_base = OTHER; note = 2'-O-methylguanosine-3'-phosphate
  modified_base 11: mod_base = OTHER; note = 2'-O-methyluridine-3'-phosphate
  modified_base 13: mod_base = OTHER; note = 2'-O-methylcytidine-3'-phosphate
  modified_base 14: mod_base = OTHER; note = 2'-fluorocytidine-3'-phosphate
  modified_base 15: mod_base = OTHER; note = 2'-O-methyluridine-3'-phosphate
  modified_base 16: mod_base = OTHER; note = 2'-O-methylguanosine-3'-phosphate
  modified_base 17: mod_base = OTHER; note = 2'-O-methylguanosine-3'-phosphate
  modified_base 18: mod_base = OTHER; note = 2'-O-methylguanosine-3'-phosphate
  modified_base 19: mod_base = OTHER; note = 2'-O-methyladenosine-3'-phosphate
  modified_base 20: mod_base = OTHER; note = 2'-O-methyladenosine-3'-phosphate
  modified_base 21: mod_base = OTHER; note = 2'-O-methyladenosine-3'-phosphorothioate
  modified_base 22: mod_base = OTHER; note = 2'-O-methylcytidine-3'-phosphorothioate
  modified_base 23: mod_base = OTHER; note = 2'-O-methyluridine-3'-phosphate
  misc_feature 1: note = RNA
  misc_feature 2: note = DNA
  misc_feature 3..4: note = RNA
  misc_feature 5: note = DNA
  misc_feature 6: note = RNA
  misc_feature 7: note = DNA
  misc_feature 8..11: note = RNA
  misc_feature 12: note = DNA
  misc_feature 13..23: note = RNA
agatgccctgtgcctgggaaact

SEQ ID NO: 7630 - DNA, 23 bp, synthetic construct
  source 1..23: mol_type = other DNA
  modified_base 1: mod_base = OTHER; note = 2'-O-methyladenosine-3'-phosphorothioate
  modified_base 2: mod_base = OTHER; note = 2'-deoxyadenosine-3'-phosphorothioate
  modified_base 3: mod_base = OTHER; note = 2'-O-methylguanosine-3'-phosphate
  modified_base 4: mod_base = OTHER; note = 2'-O-methyladenosine-3'-phosphate
  modified_base 6: mod_base = OTHER; note = 2'-O-methylguanosine-3'-phosphate
  modified_base 8: mod_base = OTHER; note = 2'-O-methylcytidine-3'-phosphate
  modified_base 9: mod_base = OTHER; note = 2'-O-methylcytidine-3'-phosphate
  modified_base 10: mod_base = OTHER; note = 2'-O-methyluridine-3'-phosphate
  modified_base 11: mod_base = OTHER; note = 2'-O-methylguanosine-3'-phosphate
  modified_base 13: mod_base = OTHER; note = 2'-O-methylguanosine-3'-phosphate
  modified_base 14: mod_base = OTHER; note = 2'-fluorocytidine-3'-phosphate
  modified_base 15: mod_base = OTHER; note = 2'-O-methylcytidine-3'-phosphate
  modified_base 16: mod_base = OTHER; note = 2'-O-methyluridine-3'-phosphate
  modified_base 17: mod_base = OTHER; note = 2'-O-methylguanosine-3'-phosphate
  modified_base 18: mod_base = OTHER; note = 2'-O-methylguanosine-3'-phosphate
  modified_base 19: mod_base = OTHER; note = 2'-O-methylguanosine-3'-phosphate
  modified_base 20: mod_base = OTHER; note = 2'-O-methyladenosine-3'-phosphate
  modified_base 21: mod_base = OTHER; note = 2'-O-methyladenosine-3'-phosphorothioate
  modified_base 22: mod_base = OTHER; note = 2'-O-methyladenosine-3'-phosphorothioate
  modified_base 23: mod_base = OTHER; note = 2'-O-methylcytidine-3'-phosphate
  misc_feature 1: note = RNA
  misc_feature 2: note = DNA
  misc_feature 3..4: note = RNA
  misc_feature 5: note = DNA
  misc_feature 6: note = RNA
  misc_feature 7: note = DNA
  misc_feature 8..11: note = RNA
  misc_feature 12: note = DNA
  misc_feature 13..23: note = RNA
aagatgccctgtgcctgggaaac

SEQ ID NO: 7631 - DNA, 23 bp, synthetic construct
  source 1..23: mol_type = other DNA
  modified_base 1: mod_base = OTHER; note = 2'-O-methyladenosine-3'-phosphorothioate
  modified_base 2: mod_base = OTHER; note = 2'-deoxycytidine-3'-phosphorothioate
  modified_base 3: mod_base = OTHER; note = 2'-O-methyladenosine-3'-phosphate
  modified_base 4: mod_base = OTHER; note = 2'-O-methylguanosine-3'-phosphate
  modified_base 6: mod_base = OTHER; note = 2'-O-methyluridine-3'-phosphate
  modified_base 8: mod_base = OTHER; note = 2'-O-methylcytidine-3'-phosphate
  modified_base 9: mod_base = OTHER; note = 2'-O-methylcytidine-3'-phosphate
  modified_base 10: mod_base = OTHER; note = 2'-O-methylcytidine-3'-phosphate
  modified_base 11: mod_base = OTHER; note = 2'-O-methyluridine-3'-phosphate
  modified_base 13: mod_base = OTHER; note = 2'-O-methyluridine-3'-phosphate
  modified_base 14: mod_base = OTHER; note = 2'-fluoroguanosine-3'-phosphate
  modified_base 15: mod_base = OTHER; note = 2'-O-methylcytidine-3'-phosphate
  modified_base 16: mod_base = OTHER; note = 2'-O-methylcytidine-3'-phosphate
  modified_base 17: mod_base = OTHER; note = 2'-O-methyluridine-3'-phosphate
  modified_base 18: mod_base = OTHER; note = 2'-O-methylguanosine-3'-phosphate
  modified_base 19: mod_base = OTHER; note = 2'-O-methylguanosine-3'-phosphate
  modified_base 20: mod_base = OTHER; note = 2'-O-methylguanosine-3'-phosphate
  modified_base 21: mod_base = OTHER; note = 2'-O-methyladenosine-3'-phosphorothioate
  modified_base 22: mod_base = OTHER; note = 2'-O-methyladenosine-3'-phosphorothioate
  modified_base 23: mod_base = OTHER; note = 2'-O-methyladenosine-3'-phosphate
  misc_feature 1: note = RNA
  misc_feature 2: note = DNA
  misc_feature 3..4: note = RNA
  misc_feature 5: note = DNA
  misc_feature 6: note = RNA
  misc_feature 7: note = DNA
  misc_feature 8..11: note = RNA
  misc_feature 12: note = DNA
  misc_feature 13..23: note = RNA
acagatgccctgtgcctgggaaa

SEQ ID NO: 7632 - DNA, 23 bp, synthetic construct
  source 1..23: mol_type = other DNA
  modified_base 1: mod_base = OTHER; note = 2'-O-methyladenosine-3'-phosphorothioate
  modified_base 2: mod_base = OTHER; note = 2'-deoxyguanosine-3'-phosphorothioate
  modified_base 3: mod_base = OTHER; note = 2'-O-methylcytidine-3'-phosphate
  modified_base 4: mod_base = OTHER; note = 2'-O-methylcytidine-3'-phosphate
  modified_base 6: mod_base = OTHER; note = 2'-O-methylguanosine-3'-phosphate
  modified_base 8: mod_base = OTHER; note = 2'-O-methyluridine-3'-phosphate
  modified_base 9: mod_base = OTHER; note = 2'-O-methylguanosine-3'-phosphate
  modified_base 10: mod_base = OTHER; note = 2'-O-methylguanosine-3'-phosphate
  modified_base 11: mod_base = OTHER; note = 2'-O-methyluridine-3'-phosphate
  modified_base 13: mod_base = OTHER; note = 2'-O-methylguanosine-3'-phosphate
  modified_base 14: mod_base = OTHER; note = 2'-fluorouridine-3'-phosphate
  modified_base 15: mod_base = OTHER; note = 2'-O-methyluridine-3'-phosphate
  modified_base 16: mod_base = OTHER; note = 2'-O-methylguanosine-3'-phosphate
  modified_base 17: mod_base = OTHER; note = 2'-O-methylguanosine-3'-phosphate
  modified_base 18: mod_base = OTHER; note = 2'-O-methylguanosine-3'-phosphate
  modified_base 19: mod_base = OTHER; note = 2'-O-methyluridine-3'-phosphate
  modified_base 20: mod_base = OTHER; note = 2'-O-methyluridine-3'-phosphate
  modified_base 21: mod_base = OTHER; note = 2'-O-methylguanosine-3'-phosphorothioate
  modified_base 22: mod_base = OTHER; note = 2'-O-methylguanosine-3'-phosphorothioate
  modified_base 23: mod_base = OTHER; note = 2'-O-methylguanosine-3'-phosphate
  misc_feature 1: note = RNA
  misc_feature 2: note = DNA
  misc_feature 3..4: note = RNA
  misc_feature 5: note = DNA
  misc_feature 6: note = RNA
  misc_feature 7: note = DNA
  misc_feature 8..11: note = RNA
  misc_feature 12: note = DNA
  misc_feature 13..23: note = RNA
agccaggtggttgttgggttggg

SEQ ID NO: 7633 - DNA, 23 bp, synthetic construct
  source 1..23: mol_type = other DNA
  modified_base 1: mod_base = OTHER; note = 2'-O-methyladenosine-3'-phosphorothioate
  modified_base 2: mod_base = OTHER; note = 2'-deoxythimidine-3'-phosphorothioate
  modified_base 3: mod_base = OTHER; note = 2'-O-methylguanosine-3'-phosphate
  modified_base 4: mod_base = OTHER; note = 2'-O-methylcytidine-3'-phosphate
  modified_base 6: mod_base = OTHER; note = 2'-O-methyladenosine-3'-phosphate
  modified_base 8: mod_base = OTHER; note = 2'-O-methylguanosine-3'-phosphate
  modified_base 9: mod_base = OTHER; note = 2'-O-methyluridine-3'-phosphate
  modified_base 10: mod_base = OTHER; note = 2'-O-methylguanosine-3'-phosphate
  modified_base 11: mod_base = OTHER; note = 2'-O-methylguanosine-3'-phosphate
  modified_base 13: mod_base = OTHER; note = 2'-O-methyluridine-3'-phosphate
  modified_base 14: mod_base = OTHER; note = 2'-fluoroguanosine-3'-phosphate
  modified_base 15: mod_base = OTHER; note = 2'-O-methyluridine-3'-phosphate
  modified_base 16: mod_base = OTHER; note = 2'-O-methyluridine-3'-phosphate
  modified_base 17: mod_base = OTHER; note = 2'-O-methylguanosine-3'-phosphate
  modified_base 18: mod_base = OTHER; note = 2'-O-methylguanosine-3'-phosphate
  modified_base 19: mod_base = OTHER; note = 2'-O-methylguanosine-3'-phosphate
  modified_base 20: mod_base = OTHER; note = 2'-O-methyluridine-3'-phosphate
  modified_base 21: mod_base = OTHER; note = 2'-O-methyluridine-3'-phosphorothioate
  modified_base 22: mod_base = OTHER; note = 2'-O-methylguanosine-3'-phosphorothioate
  modified_base 23: mod_base = OTHER; note = 2'-O-methylguanosine-3'-phosphate
  misc_feature 1: note = RNA
  misc_feature 2: note = DNA
  misc_feature 3..4: note = RNA
  misc_feature 5: note = DNA
  misc_feature 6: note = RNA
  misc_feature 7: note = DNA
  misc_feature 8..11: note = RNA
  misc_feature 12: note = DNA
  misc_feature 13..23: note = RNA
atgccaggtggttgttgggttgg

SEQ ID NO: 7634 - DNA, 23 bp, synthetic construct
  source 1..23: mol_type = other DNA
  modified_base 1: mod_base = OTHER; note = 2'-O-methyladenosine-3'-phosphorothioate
  modified_base 2: mod_base = OTHER; note = 2'-deoxythimidine-3'-phosphorothioate
  modified_base 3: mod_base = OTHER; note = 2'-O-methyluridine-3'-phosphate
  modified_base 4: mod_base = OTHER; note = 2'-O-methylguanosine-3'-phosphate
  modified_base 6: mod_base = OTHER; note = 2'-O-methylcytidine-3'-phosphate
  modified_base 8: mod_base = OTHER; note = 2'-O-methylguanosine-3'-phosphate
  modified_base 9: mod_base = OTHER; note = 2'-O-methylguanosine-3'-phosphate
  modified_base 10: mod_base = OTHER; note = 2'-O-methyluridine-3'-phosphate
  modified_base 11: mod_base = OTHER; note = 2'-O-methylguanosine-3'-phosphate
  modified_base 13: mod_base = OTHER; note = 2'-O-methyluridine-3'-phosphate
  modified_base 14: mod_base = OTHER; note = 2'-fluorouridine-3'-phosphate
  modified_base 15: mod_base = OTHER; note = 2'-O-methylguanosine-3'-phosphate
  modified_base 16: mod_base = OTHER; note = 2'-O-methyluridine-3'-phosphate
  modified_base 17: mod_base = OTHER; note = 2'-O-methyluridine-3'-phosphate
  modified_base 18: mod_base = OTHER; note = 2'-O-methylguanosine-3'-phosphate
  modified_base 19: mod_base = OTHER; note = 2'-O-methylguanosine-3'-phosphate
  modified_base 20: mod_base = OTHER; note = 2'-O-methylguanosine-3'-phosphate
  modified_base 21: mod_base = OTHER; note = 2'-O-methyluridine-3'-phosphorothioate
  modified_base 22: mod_base = OTHER; note = 2'-O-methyluridine-3'-phosphorothioate
  modified_base 23: mod_base = OTHER; note = 2'-O-methylguanosine-3'-phosphate
  misc_feature 1: note = RNA
  misc_feature 2: note = DNA
  misc_feature 3..4: note = RNA
  misc_feature 5: note = DNA
  misc_feature 6: note = RNA
  misc_feature 7: note = DNA
  misc_feature 8..11: note = RNA
  misc_feature 12: note = DNA
  misc_feature 13..23: note = RNA
attgccaggtggttgttgggttg

SEQ ID NO: 7635 - DNA, 23 bp, synthetic construct
  source 1..23: mol_type = other DNA
  modified_base 1: mod_base = OTHER; note = 2'-O-methyladenosine-3'-phosphorothioate
  modified_base 2: mod_base = OTHER; note = 2'-deoxyadenosine-3'-phosphorothioate
  modified_base 3: mod_base = OTHER; note = 2'-O-methyluridine-3'-phosphate
  modified_base 4: mod_base = OTHER; note = 2'-O-methyluridine-3'-phosphate
  modified_base 6: mod_base = OTHER; note = 2'-O-methylcytidine-3'-phosphate
  modified_base 8: mod_base = OTHER; note = 2'-O-methyladenosine-3'-phosphate
  modified_base 9: mod_base = OTHER; note = 2'-O-methylguanosine-3'-phosphate
  modified_base 10: mod_base = OTHER; note = 2'-O-methylguanosine-3'-phosphate
  modified_base 11: mod_base = OTHER; note = 2'-O-methyluridine-3'-phosphate
  modified_base 13: mod_base = OTHER; note = 2'-O-methylguanosine-3'-phosphate
  modified_base 14: mod_base = OTHER; note = 2'-fluorouridine-3'-phosphate
  modified_base 15: mod_base = OTHER; note = 2'-O-methyluridine-3'-phosphate
  modified_base 16: mod_base = OTHER; note = 2'-O-methylguanosine-3'-phosphate
  modified_base 17: mod_base = OTHER; note = 2'-O-methyluridine-3'-phosphate
  modified_base 18: mod_base = OTHER; note = 2'-O-methyluridine-3'-phosphate
  modified_base 19: mod_base = OTHER; note = 2'-O-methylguanosine-3'-phosphate
  modified_base 20: mod_base = OTHER; note = 2'-O-methylguanosine-3'-phosphate
  modified_base 21: mod_base = OTHER; note = 2'-O-methylguanosine-3'-phosphorothioate
  modified_base 22: mod_base = OTHER; note = 2'-O-methyluridine-3'-phosphorothioate
  modified_base 23: mod_base = OTHER; note = 2'-O-methyluridine-3'-phosphate
  misc_feature 1: note = RNA
  misc_feature 2: note = DNA
  misc_feature 3..4: note = RNA
  misc_feature 5: note = DNA
  misc_feature 6: note = RNA
  misc_feature 7: note = DNA
  misc_feature 8..11: note = RNA
  misc_feature 12: note = DNA
  misc_feature 13..23: note = RNA
aattgccaggtggttgttgggtt

SEQ ID NO: 7636 - DNA, 23 bp, synthetic construct
  source 1..23: mol_type = other DNA
  modified_base 1: mod_base = OTHER; note = 2'-O-methyladenosine-3'-phosphorothioate
  modified_base 2: mod_base = OTHER; note = 2'-deoxythimidine-3'-phosphorothioate
  modified_base 3: mod_base = OTHER; note = 2'-O-methyladenosine-3'-phosphate
  modified_base 4: mod_base = OTHER; note = 2'-O-methyluridine-3'-phosphate
  modified_base 6: mod_base = OTHER; note = 2'-O-methylguanosine-3'-phosphate
  modified_base 8: mod_base = OTHER; note = 2'-O-methylcytidine-3'-phosphate
  modified_base 9: mod_base = OTHER; note = 2'-O-methyladenosine-3'-phosphate
  modified_base 10: mod_base = OTHER; note = 2'-O-methylguanosine-3'-phosphate
  modified_base 11: mod_base = OTHER; note = 2'-O-methylguanosine-3'-phosphate
  modified_base 13: mod_base = OTHER; note = 2'-O-methylguanosine-3'-phosphate
  modified_base 14: mod_base = OTHER; note = 2'-fluoroguanosine-3'-phosphate
  modified_base 15: mod_base = OTHER; note = 2'-O-methyluridine-3'-phosphate
  modified_base 16: mod_base = OTHER; note = 2'-O-methyluridine-3'-phosphate
  modified_base 17: mod_base = OTHER; note = 2'-O-methylguanosine-3'-phosphate
  modified_base 18: mod_base = OTHER; note = 2'-O-methyluridine-3'-phosphate
  modified_base 19: mod_base = OTHER; note = 2'-O-methyluridine-3'-phosphate
  modified_base 20: mod_base = OTHER; note = 2'-O-methylguanosine-3'-phosphate
  modified_base 21: mod_base = OTHER; note = 2'-O-methylguanosine-3'-phosphorothioate
  modified_base 22: mod_base = OTHER; note = 2'-O-methylguanosine-3'-phosphorothioate
  modified_base 23: mod_base = OTHER; note = 2'-O-methyluridine-3'-phosphate
  misc_feature 1: note = RNA
  misc_feature 2: note = DNA
  misc_feature 3..4: note = RNA
  misc_feature 5: note = DNA
  misc_feature 6: note = RNA
  misc_feature 7: note = DNA
  misc_feature 8..11: note = RNA
  misc_feature 12: note = DNA
  misc_feature 13..23: note = RNA
atattgccaggtggttgttgggt

SEQ ID NO: 7637 - DNA, 23 bp, synthetic construct
  source 1..23: mol_type = other DNA
  modified_base 1: mod_base = OTHER; note = 2'-O-methyladenosine-3'-phosphorothioate
  modified_base 2: mod_base = OTHER; note = 2'-deoxyadenosine-3'-phosphorothioate
  modified_base 3: mod_base = OTHER; note = 2'-O-methyluridine-3'-phosphate
  modified_base 4: mod_base = OTHER; note = 2'-O-methyladenosine-3'-phosphate
  modified_base 6: mod_base = OTHER; note = 2'-O-methyluridine-3'-phosphate
  modified_base 8: mod_base = OTHER; note = 2'-O-methylcytidine-3'-phosphate
  modified_base 9: mod_base = OTHER; note = 2'-O-methylcytidine-3'-phosphate
  modified_base 10: mod_base = OTHER; note = 2'-O-methyladenosine-3'-phosphate
  modified_base 11: mod_base = OTHER; note = 2'-O-methylguanosine-3'-phosphate
  modified_base 13: mod_base = OTHER; note = 2'-O-methyluridine-3'-phosphate
  modified_base 14: mod_base = OTHER; note = 2'-fluoroguanosine-3'-phosphate
  modified_base 15: mod_base = OTHER; note = 2'-O-methylguanosine-3'-phosphate
  modified_base 16: mod_base = OTHER; note = 2'-O-methyluridine-3'-phosphate
  modified_base 17: mod_base = OTHER; note = 2'-O-methyluridine-3'-phosphate
  modified_base 18: mod_base = OTHER; note = 2'-O-methylguanosine-3'-phosphate
  modified_base 19: mod_base = OTHER; note = 2'-O-methyluridine-3'-phosphate
  modified_base 20: mod_base = OTHER; note = 2'-O-methyluridine-3'-phosphate
  modified_base 21: mod_base = OTHER; note = 2'-O-methylguanosine-3'-phosphorothioate
  modified_base 22: mod_base = OTHER; note = 2'-O-methylguanosine-3'-phosphorothioate
  modified_base 23: mod_base = OTHER; note = 2'-O-methylguanosine-3'-phosphate
  misc_feature 1: note = RNA
  misc_feature 2: note = DNA
  misc_feature 3..4: note = RNA
  misc_feature 5: note = DNA
  misc_feature 6: note = RNA
  misc_feature 7: note = DNA
  misc_feature 8..11: note = RNA
  misc_feature 12: note = DNA
  misc_feature 13..23: note = RNA
aatattgccaggtggttgttggg

SEQ ID NO: 7638 - DNA, 23 bp, synthetic construct
  source 1..23: mol_type = other DNA
  modified_base 1: mod_base = OTHER; note = 2'-O-methyladenosine-3'-phosphorothioate
  modified_base 2: mod_base = OTHER; note = 2'-deoxycytidine-3'-phosphorothioate
  modified_base 3: mod_base = OTHER; note = 2'-O-methyladenosine-3'-phosphate
  modified_base 4: mod_base = OTHER; note = 2'-O-methyluridine-3'-phosphate
  modified_base 6: mod_base = OTHER; note = 2'-O-methyluridine-3'-phosphate
  modified_base 8: mod_base = OTHER; note = 2'-O-methylguanosine-3'-phosphate
  modified_base 9: mod_base = OTHER; note = 2'-O-methylcytidine-3'-phosphate
  modified_base 10: mod_base = OTHER; note = 2'-O-methylcytidine-3'-phosphate
  modified_base 11: mod_base = OTHER; note = 2'-O-methyladenosine-3'-phosphate
  modified_base 13: mod_base = OTHER; note = 2'-O-methylguanosine-3'-phosphate
  modified_base 14: mod_base = OTHER; note = 2'-fluorouridine-3'-phosphate
  modified_base 15: mod_base = OTHER; note = 2'-O-methylguanosine-3'-phosphate
  modified_base 16: mod_base = OTHER; note = 2'-O-methylguanosine-3'-phosphate
  modified_base 17: mod_base = OTHER; note = 2'-O-methyluridine-3'-phosphate
  modified_base 18: mod_base = OTHER; note = 2'-O-methyluridine-3'-phosphate
  modified_base 19: mod_base = OTHER; note = 2'-O-methylguanosine-3'-phosphate
  modified_base 20: mod_base = OTHER; note = 2'-O-methyluridine-3'-phosphate
  modified_base 21: mod_base = OTHER; note = 2'-O-methyluridine-3'-phosphorothioate
  modified_base 22: mod_base = OTHER; note = 2'-O-methylguanosine-3'-phosphorothioate
  modified_base 23: mod_base = OTHER; note = 2'-O-methylguanosine-3'-phosphate
  misc_feature 1: note = RNA
  misc_feature 2: note = DNA
  misc_feature 3..4: note = RNA
  misc_feature 5: note = DNA
  misc_feature 6: note = RNA
  misc_feature 7: note = DNA
  misc_feature 8..11: note = RNA
  misc_feature 12: note = DNA
  misc_feature 13..23: note = RNA
acatattgccaggtggttgttgg

SEQ ID NO: 7639 - DNA, 23 bp, synthetic construct
  source 1..23: mol_type = other DNA
  modified_base 1: mod_base = OTHER; note = 2'-O-methyladenosine-3'-phosphorothioate
  modified_base 2: mod_base = OTHER; note = 2'-deoxythimidine-3'-phosphorothioate
  modified_base 3: mod_base = OTHER; note = 2'-O-methylcytidine-3'-phosphate
  modified_base 4: mod_base = OTHER; note = 2'-O-methyladenosine-3'-phosphate
  modified_base 6: mod_base = OTHER; note = 2'-O-methyladenosine-3'-phosphate
  modified_base 8: mod_base = OTHER; note = 2'-O-methyluridine-3'-phosphate
  modified_base 9: mod_base = OTHER; note = 2'-O-methylguanosine-3'-phosphate
  modified_base 10: mod_base = OTHER; note = 2'-O-methylcytidine-3'-phosphate
  modified_base 11: mod_base = OTHER; note = 2'-O-methylcytidine-3'-phosphate
  modified_base 13: mod_base = OTHER; note = 2'-O-methylguanosine-3'-phosphate
  modified_base 14: mod_base = OTHER; note = 2'-fluoroguanosine-3'-phosphate
  modified_base 15: mod_base = OTHER; note = 2'-O-methyluridine-3'-phosphate
  modified_base 16: mod_base = OTHER; note = 2'-O-methylguanosine-3'-phosphate
  modified_base 17: mod_base = OTHER; note = 2'-O-methylguanosine-3'-phosphate
  modified_base 18: mod_base = OTHER; note = 2'-O-methyluridine-3'-phosphate
  modified_base 19: mod_base = OTHER; note = 2'-O-methyluridine-3'-phosphate
  modified_base 20: mod_base = OTHER; note = 2'-O-methylguanosine-3'-phosphate
  modified_base 21: mod_base = OTHER; note = 2'-O-methyluridine-3'-phosphorothioate
  modified_base 22: mod_base = OTHER; note = 2'-O-methyluridine-3'-phosphorothioate
  modified_base 23: mod_base = OTHER; note = 2'-O-methylguanosine-3'-phosphate
  misc_feature 1: note = RNA
  misc_feature 2: note = DNA
  misc_feature 3..4: note = RNA
  misc_feature 5: note = DNA
  misc_feature 6: note = RNA
  misc_feature 7: note = DNA
  misc_feature 8..11: note = RNA
  misc_feature 12: note = DNA
  misc_feature 13..23: note = RNA
atcatattgccaggtggttgttg

SEQ ID NO: 7640 - DNA, 23 bp, synthetic construct
  source 1..23: mol_type = other DNA
  modified_base 1: mod_base = OTHER; note = 2'-O-methyladenosine-3'-phosphorothioate
  modified_base 2: mod_base = OTHER; note = 2'-deoxyguanosine-3'-phosphorothioate
  modified_base 3: mod_base = OTHER; note = 2'-O-methyluridine-3'-phosphate
  modified_base 4: mod_base = OTHER; note = 2'-O-methylcytidine-3'-phosphate
  modified_base 6: mod_base = OTHER; note = 2'-O-methyluridine-3'-phosphate
  modified_base 8: mod_base = OTHER; note = 2'-O-methyluridine-3'-phosphate
  modified_base 9: mod_base = OTHER; note = 2'-O-methyluridine-3'-phosphate
  modified_base 10: mod_base = OTHER; note = 2'-O-methylguanosine-3'-phosphate
  modified_base 11: mod_base = OTHER; note = 2'-O-methylcytidine-3'-phosphate
  modified_base 13: mod_base = OTHER; note = 2'-O-methyladenosine-3'-phosphate
  modified_base 14: mod_base = OTHER; note = 2'-fluoroguanosine-3'-phosphate
  modified_base 15: mod_base = OTHER; note = 2'-O-methylguanosine-3'-phosphate
  modified_base 16: mod_base = OTHER; note = 2'-O-methyluridine-3'-phosphate
  modified_base 17: mod_base = OTHER; note = 2'-O-methylguanosine-3'-phosphate
  modified_base 18: mod_base = OTHER; note = 2'-O-methylguanosine-3'-phosphate
  modified_base 19: mod_base = OTHER; note = 2'-O-methyluridine-3'-phosphate
  modified_base 20: mod_base = OTHER; note = 2'-O-methyluridine-3'-phosphate
  modified_base 21: mod_base = OTHER; note = 2'-O-methylguanosine-3'-phosphorothioate
  modified_base 22: mod_base = OTHER; note = 2'-O-methyluridine-3'-phosphorothioate
  modified_base 23: mod_base = OTHER; note = 2'-O-methyluridine-3'-phosphate
  misc_feature 1: note = RNA
  misc_feature 2: note = DNA
  misc_feature 3..4: note = RNA
  misc_feature 5: note = DNA
  misc_feature 6: note = RNA
  misc_feature 7: note = DNA
  misc_feature 8..11: note = RNA
  misc_feature 12: note = DNA
  misc_feature 13..23: note = RNA
agtcatattgccaggtggttgtt

SEQ ID NO: 7641 - DNA, 23 bp, synthetic construct
  source 1..23: mol_type = other DNA
  modified_base 1: mod_base = OTHER; note = 2'-O-methyladenosine-3'-phosphorothioate
  modified_base 2: mod_base = OTHER; note = 2'-deoxyadenosine-3'-phosphorothioate
  modified_base 3: mod_base = OTHER; note = 2'-O-methylguanosine-3'-phosphate
  modified_base 4: mod_base = OTHER; note = 2'-O-methyluridine-3'-phosphate
  modified_base 6: mod_base = OTHER; note = 2'-O-methyladenosine-3'-phosphate
  modified_base 8: mod_base = OTHER; note = 2'-O-methyladenosine-3'-phosphate
  modified_base 9: mod_base = OTHER; note = 2'-O-methyluridine-3'-phosphate
  modified_base 10: mod_base = OTHER; note = 2'-O-methyluridine-3'-phosphate
  modified_base 11: mod_base = OTHER; note = 2'-O-methylguanosine-3'-phosphate
  modified_base 13: mod_base = OTHER; note = 2'-O-methylcytidine-3'-phosphate
  modified_base 14: mod_base = OTHER; note = 2'-fluoroadenosine-3'-phosphate
  modified_base 15: mod_base = OTHER; note = 2'-O-methylguanosine-3'-phosphate
  modified_base 16: mod_base = OTHER; note = 2'-O-methylguanosine-3'-phosphate
  modified_base 17: mod_base = OTHER; note = 2'-O-methyluridine-3'-phosphate
  modified_base 18: mod_base = OTHER; note = 2'-O-methylguanosine-3'-phosphate
  modified_base 19: mod_base = OTHER; note = 2'-O-methylguanosine-3'-phosphate
  modified_base 20: mod_base = OTHER; note = 2'-O-methyluridine-3'-phosphate
  modified_base 21: mod_base = OTHER; note = 2'-O-methyluridine-3'-phosphorothioate
  modified_base 22: mod_base = OTHER; note = 2'-O-methylguanosine-3'-phosphorothioate
  modified_base 23: mod_base = OTHER; note = 2'-O-methyluridine-3'-phosphate
  misc_feature 1: note = RNA
  misc_feature 2: note = DNA
  misc_feature 3..4: note = RNA
  misc_feature 5: note = DNA
  misc_feature 6: note = RNA
  misc_feature 7: note = DNA
  misc_feature 8..11: note = RNA
  misc_feature 12: note = DNA
  misc_feature 13..23: note = RNA
aagtcatattgccaggtggttgt

SEQ ID NO: 7642 - DNA, 23 bp, synthetic construct
  source 1..23: mol_type = other DNA
  modified_base 1: mod_base = OTHER; note = 2'-O-methyladenosine-3'-phosphorothioate
  modified_base 2: mod_base = OTHER; note = 2'-deoxyguanosine-3'-phosphorothioate
  modified_base 3: mod_base = OTHER; note = 2'-O-methyladenosine-3'-phosphate
  modified_base 4: mod_base = OTHER; note = 2'-O-methylguanosine-3'-phosphate
  modified_base 6: mod_base = OTHER; note = 2'-O-methylcytidine-3'-phosphate
  modified_base 8: mod_base = OTHER; note = 2'-O-methyluridine-3'-phosphate
  modified_base 9: mod_base = OTHER; note = 2'-O-methyladenosine-3'-phosphate
  modified_base 10: mod_base = OTHER; note = 2'-O-methyluridine-3'-phosphate
  modified_base 11: mod_base = OTHER; note = 2'-O-methyluridine-3'-phosphate
  modified_base 13: mod_base = OTHER; note = 2'-O-methylcytidine-3'-phosphate
  modified_base 14: mod_base = OTHER; note = 2'-fluorocytidine-3'-phosphate
  modified_base 15: mod_base = OTHER; note = 2'-O-methyladenosine-3'-phosphate
  modified_base 16: mod_base = OTHER; note = 2'-O-methylguanosine-3'-phosphate
  modified_base 17: mod_base = OTHER; note = 2'-O-methylguanosine-3'-phosphate
  modified_base 18: mod_base = OTHER; note = 2'-O-methyluridine-3'-phosphate
  modified_base 19: mod_base = OTHER; note = 2'-O-methylguanosine-3'-phosphate
  modified_base 20: mod_base = OTHER; note = 2'-O-methylguanosine-3'-phosphate
  modified_base 21: mod_base = OTHER; note = 2'-O-methyluridine-3'-phosphorothioate
  modified_base 22: mod_base = OTHER; note = 2'-O-methyluridine-3'-phosphorothioate
  modified_base 23: mod_base = OTHER; note = 2'-O-methylguanosine-3'-phosphate
  misc_feature 1: note = RNA
  misc_feature 2: note = DNA
  misc_feature 3..4: note = RNA
  misc_feature 5: note = DNA
  misc_feature 6: note = RNA
  misc_feature 7: note = DNA
  misc_feature 8..11: note = RNA
  misc_feature 12: note = DNA
  misc_feature 13..23: note = RNA
agagtcatattgccaggtggttg

SEQ ID NO: 7643 - DNA, 23 bp, synthetic construct
  source 1..23: mol_type = other DNA
  modified_base 1: mod_base = OTHER; note = 2'-O-methyladenosine-3'-phosphorothioate
  modified_base 2: mod_base = OTHER; note = 2'-deoxythimidine-3'-phosphorothioate
  modified_base 3: mod_base = OTHER; note = 2'-O-methylguanosine-3'-phosphate
  modified_base 4: mod_base = OTHER; note = 2'-O-methyladenosine-3'-phosphate
  modified_base 6: mod_base = OTHER; note = 2'-O-methyluridine-3'-phosphate
  modified_base 8: mod_base = OTHER; note = 2'-O-methyladenosine-3'-phosphate
  modified_base 9: mod_base = OTHER; note = 2'-O-methyluridine-3'-phosphate
  modified_base 10: mod_base = OTHER; note = 2'-O-methyladenosine-3'-phosphate
  modified_base 11: mod_base = OTHER; note = 2'-O-methyluridine-3'-phosphate
  modified_base 13: mod_base = OTHER; note = 2'-O-methylguanosine-3'-phosphate
  modified_base 14: mod_base = OTHER; note = 2'-fluorocytidine-3'-phosphate
  modified_base 15: mod_base = OTHER; note = 2'-O-methylcytidine-3'-phosphate
  modified_base 16: mod_base = OTHER; note = 2'-O-methyladenosine-3'-phosphate
  modified_base 17: mod_base = OTHER; note = 2'-O-methylguanosine-3'-phosphate
  modified_base 18: mod_base = OTHER; note = 2'-O-methylguanosine-3'-phosphate
  modified_base 19: mod_base = OTHER; note = 2'-O-methyluridine-3'-phosphate
  modified_base 20: mod_base = OTHER; note = 2'-O-methylguanosine-3'-phosphate
  modified_base 21: mod_base = OTHER; note = 2'-O-methylguanosine-3'-phosphorothioate
  modified_base 22: mod_base = OTHER; note = 2'-O-methyluridine-3'-phosphorothioate
  modified_base 23: mod_base = OTHER; note = 2'-O-methyluridine-3'-phosphate
  misc_feature 1: note = RNA
  misc_feature 2: note = DNA
  misc_feature 3..4: note = RNA
  misc_feature 5: note = DNA
  misc_feature 6: note = RNA
  misc_feature 7: note = DNA
  misc_feature 8..11: note = RNA
  misc_feature 12: note = DNA
  misc_feature 13..23: note = RNA
atgagtcatattgccaggtggtt

SEQ ID NO: 7644 - DNA, 23 bp, synthetic construct
  source 1..23: mol_type = other DNA
  modified_base 1: mod_base = OTHER; note = 2'-O-methyladenosine-3'-phosphorothioate
  modified_base 2: mod_base = OTHER; note = 2'-deoxyguanosine-3'-phosphorothioate
  modified_base 3: mod_base = OTHER; note = 2'-O-methyluridine-3'-phosphate
  modified_base 4: mod_base = OTHER; note = 2'-O-methylguanosine-3'-phosphate
  modified_base 6: mod_base = OTHER; note = 2'-O-methylguanosine-3'-phosphate
  modified_base 8: mod_base = OTHER; note = 2'-O-methylcytidine-3'-phosphate
  modified_base 9: mod_base = OTHER; note = 2'-O-methyladenosine-3'-phosphate
  modified_base 10: mod_base = OTHER; note = 2'-O-methyluridine-3'-phosphate
  modified_base 11: mod_base = OTHER; note = 2'-O-methyladenosine-3'-phosphate
  modified_base 13: mod_base = OTHER; note = 2'-O-methyluridine-3'-phosphate
  modified_base 14: mod_base = OTHER; note = 2'-fluoroguanosine-3'-phosphate
  modified_base 15: mod_base = OTHER; note = 2'-O-methylcytidine-3'-phosphate
  modified_base 16: mod_base = OTHER; note = 2'-O-methylcytidine-3'-phosphate
  modified_base 17: mod_base = OTHER; note = 2'-O-methyladenosine-3'-phosphate
  modified_base 18: mod_base = OTHER; note = 2'-O-methylguanosine-3'-phosphate
  modified_base 19: mod_base = OTHER; note = 2'-O-methylguanosine-3'-phosphate
  modified_base 20: mod_base = OTHER; note = 2'-O-methyluridine-3'-phosphate
  modified_base 21: mod_base = OTHER; note = 2'-O-methylguanosine-3'-phosphorothioate
  modified_base 22: mod_base = OTHER; note = 2'-O-methylguanosine-3'-phosphorothioate
  modified_base 23: mod_base = OTHER; note = 2'-O-methyluridine-3'-phosphate
  misc_feature 1: note = RNA
  misc_feature 2: note = DNA
  misc_feature 3..4: note = RNA
  misc_feature 5: note = DNA
  misc_feature 6: note = RNA
  misc_feature 7: note = DNA
  misc_feature 8..11: note = RNA
  misc_feature 12: note = DNA
  misc_feature 13..23: note = RNA
agtgagtcatattgccaggtggt

SEQ ID NO: 7645 - DNA, 23 bp, synthetic construct
  source 1..23: mol_type = other DNA
  modified_base 1: mod_base = OTHER; note = 2'-O-methyladenosine-3'-phosphorothioate
  modified_base 2: mod_base = OTHER; note = 2'-deoxyadenosine-3'-phosphorothioate
  modified_base 3: mod_base = OTHER; note = 2'-O-methylguanosine-3'-phosphate
  modified_base 4: mod_base = OTHER; note = 2'-O-methyluridine-3'-phosphate
  modified_base 6: mod_base = OTHER; note = 2'-O-methyladenosine-3'-phosphate
  modified_base 8: mod_base = OTHER; note = 2'-O-methyluridine-3'-phosphate
  modified_base 9: mod_base = OTHER; note = 2'-O-methylcytidine-3'-phosphate
  modified_base 10: mod_base = OTHER; note = 2'-O-methyladenosine-3'-phosphate
  modified_base 11: mod_base = OTHER; note = 2'-O-methyluridine-3'-phosphate
  modified_base 13: mod_base = OTHER; note = 2'-O-methyluridine-3'-phosphate
  modified_base 14: mod_base = OTHER; note = 2'-fluorouridine-3'-phosphate
  modified_base 15: mod_base = OTHER; note = 2'-O-methylguanosine-3'-phosphate
  modified_base 16: mod_base = OTHER; note = 2'-O-methylcytidine-3'-phosphate
  modified_base 17: mod_base = OTHER; note = 2'-O-methylcytidine-3'-phosphate
  modified_base 18: mod_base = OTHER; note = 2'-O-methyladenosine-3'-phosphate
  modified_base 19: mod_base = OTHER; note = 2'-O-methylguanosine-3'-phosphate
  modified_base 20: mod_base = OTHER; note = 2'-O-methylguanosine-3'-phosphate
  modified_base 21: mod_base = OTHER; note = 2'-O-methyluridine-3'-phosphorothioate
  modified_base 22: mod_base = OTHER; note = 2'-O-methylguanosine-3'-phosphorothioate
  modified_base 23: mod_base = OTHER; note = 2'-O-methylguanosine-3'-phosphate
  misc_feature 1: note = RNA
  misc_feature 2: note = DNA
  misc_feature 3..4: note = RNA
  misc_feature 5: note = DNA
  misc_feature 6: note = RNA
  misc_feature 7: note = DNA
  misc_feature 8..11: note = RNA
  misc_feature 12: note = DNA
  misc_feature 13..23: note = RNA
aagtgagtcatattgccaggtgg

SEQ ID NO: 7646 - DNA, 23 bp, synthetic construct
  source 1..23: mol_type = other DNA
  modified_base 1: mod_base = OTHER; note = 2'-O-methyladenosine-3'-phosphorothioate
  modified_base 2: mod_base = OTHER; note = 2'-deoxyadenosine-3'-phosphorothioate
  modified_base 3: mod_base = OTHER; note = 2'-O-methyladenosine-3'-phosphate
  modified_base 4: mod_base = OTHER; note = 2'-O-methylguanosine-3'-phosphate
  modified_base 6: mod_base = OTHER; note = 2'-O-methylguanosine-3'-phosphate
  modified_base 8: mod_base = OTHER; note = 2'-O-methylguanosine-3'-phosphate
  modified_base 9: mod_base = OTHER; note = 2'-O-methyluridine-3'-phosphate
  modified_base 10: mod_base = OTHER; note = 2'-O-methylcytidine-3'-phosphate
  modified_base 11: mod_base = OTHER; note = 2'-O-methyladenosine-3'-phosphate
  modified_base 13: mod_base = OTHER; note = 2'-O-methyladenosine-3'-phosphate
  modified_base 14: mod_base = OTHER; note = 2'-fluorouridine-3'-phosphate
  modified_base 15: mod_base = OTHER; note = 2'-O-methyluridine-3'-phosphate
  modified_base 16: mod_base = OTHER; note = 2'-O-methylguanosine-3'-phosphate
  modified_base 17: mod_base = OTHER; note = 2'-O-methylcytidine-3'-phosphate
  modified_base 18: mod_base = OTHER; note = 2'-O-methylcytidine-3'-phosphate
  modified_base 19: mod_base = OTHER; note = 2'-O-methyladenosine-3'-phosphate
  modified_base 20: mod_base = OTHER; note = 2'-O-methylguanosine-3'-phosphate
  modified_base 21: mod_base = OTHER; note = 2'-O-methylguanosine-3'-phosphorothioate
  modified_base 22: mod_base = OTHER; note = 2'-O-methyluridine-3'-phosphorothioate
  modified_base 23: mod_base = OTHER; note = 2'-O-methylguanosine-3'-phosphate
  misc_feature 1: note = RNA
  misc_feature 2: note = DNA
  misc_feature 3..4: note = RNA
  misc_feature 5: note = DNA
  misc_feature 6: note = RNA
  misc_feature 7: note = DNA
  misc_feature 8..11: note = RNA
  misc_feature 12: note = DNA
  misc_feature 13..23: note = RNA
aaagtgagtcatattgccaggtg

SEQ ID NO: 7647 - DNA, 23 bp, synthetic construct
  source 1..23: mol_type = other DNA
  modified_base 1: mod_base = OTHER; note = 2'-O-methyladenosine-3'-phosphorothioate
  modified_base 2: mod_base = OTHER; note = 2'-deoxycytidine-3'-phosphorothioate
  modified_base 3: mod_base = OTHER; note = 2'-O-methyladenosine-3'-phosphate
  modified_base 4: mod_base = OTHER; note = 2'-O-methyladenosine-3'-phosphate
  modified_base 6: mod_base = OTHER; note = 2'-O-methyluridine-3'-phosphate
  modified_base 8: mod_base = OTHER; note = 2'-O-methyladenosine-3'-phosphate
  modified_base 9: mod_base = OTHER; note = 2'-O-methylguanosine-3'-phosphate
  modified_base 10: mod_base = OTHER; note = 2'-O-methyluridine-3'-phosphate
  modified_base 11: mod_base = OTHER; note = 2'-O-methylcytidine-3'-phosphate
  modified_base 13: mod_base = OTHER; note = 2'-O-methyluridine-3'-phosphate
  modified_base 14: mod_base = OTHER; note = 2'-fluoroadenosine-3'-phosphate
  modified_base 15: mod_base = OTHER; note = 2'-O-methyluridine-3'-phosphate
  modified_base 16: mod_base = OTHER; note = 2'-O-methyluridine-3'-phosphate
  modified_base 17: mod_base = OTHER; note = 2'-O-methylguanosine-3'-phosphate
  modified_base 18: mod_base = OTHER; note = 2'-O-methylcytidine-3'-phosphate
  modified_base 19: mod_base = OTHER; note = 2'-O-methylcytidine-3'-phosphate
  modified_base 20: mod_base = OTHER; note = 2'-O-methyladenosine-3'-phosphate
  modified_base 21: mod_base = OTHER; note = 2'-O-methylguanosine-3'-phosphorothioate
  modified_base 22: mod_base = OTHER; note = 2'-O-methylguanosine-3'-phosphorothioate
  modified_base 23: mod_base = OTHER; note = 2'-O-methyluridine-3'-phosphate
  misc_feature 1: note = RNA
  misc_feature 2: note = DNA
  misc_feature 3..4: note = RNA
  misc_feature 5: note = DNA
  misc_feature 6: note = RNA
  misc_feature 7: note = DNA
  misc_feature 8..11: note = RNA
  misc_feature 12: note = DNA
  misc_feature 13..23: note = RNA
acaagtgagtcatattgccaggt

SEQ ID NO: 7648 - DNA, 23 bp, synthetic construct
  source 1..23: mol_type = other DNA
  modified_base 1: mod_base = OTHER; note = 2'-O-methyladenosine-3'-phosphorothioate
  modified_base 2: mod_base = OTHER; note = 2'-deoxythimidine-3'-phosphorothioate
  modified_base 3: mod_base = OTHER; note = 2'-O-methylcytidine-3'-phosphate
  modified_base 4: mod_base = OTHER; note = 2'-O-methyladenosine-3'-phosphate
  modified_base 6: mod_base = OTHER; note = 2'-O-methylguanosine-3'-phosphate
  modified_base 8: mod_base = OTHER; note = 2'-O-methylguanosine-3'-phosphate
  modified_base 9: mod_base = OTHER; note = 2'-O-methyladenosine-3'-phosphate
  modified_base 10: mod_base = OTHER; note = 2'-O-methylguanosine-3'-phosphate
  modified_base 11: mod_base = OTHER; note = 2'-O-methyluridine-3'-phosphate
  modified_base 13: mod_base = OTHER; note = 2'-O-methyladenosine-3'-phosphate
  modified_base 14: mod_base = OTHER; note = 2'-fluorouridine-3'-phosphate
  modified_base 15: mod_base = OTHER; note = 2'-O-methyladenosine-3'-phosphate
  modified_base 16: mod_base = OTHER; note = 2'-O-methyluridine-3'-phosphate
  modified_base 17: mod_base = OTHER; note = 2'-O-methyluridine-3'-phosphate
  modified_base 18: mod_base = OTHER; note = 2'-O-methylguanosine-3'-phosphate
  modified_base 19: mod_base = OTHER; note = 2'-O-methylcytidine-3'-phosphate
  modified_base 20: mod_base = OTHER; note = 2'-O-methylcytidine-3'-phosphate
  modified_base 21: mod_base = OTHER; note = 2'-O-methyladenosine-3'-phosphorothioate
  modified_base 22: mod_base = OTHER; note = 2'-O-methylguanosine-3'-phosphorothioate
  modified_base 23: mod_base = OTHER; note = 2'-O-methylguanosine-3'-phosphate
  misc_feature 1: note = RNA
  misc_feature 2: note = DNA
  misc_feature 3..4: note = RNA
  misc_feature 5: note = DNA
  misc_feature 6: note = RNA
  misc_feature 7: note = DNA
  misc_feature 8..11: note = RNA
  misc_feature 12: note = DNA
  misc_feature 13..23: note = RNA
atcaagtgagtcatattgccagg

SEQ ID NO: 7649 - DNA, 23 bp, synthetic construct
  source 1..23: mol_type = other DNA
  modified_base 1: mod_base = OTHER; note = 2'-O-methyladenosine-3'-phosphorothioate
  modified_base 2: mod_base = OTHER; note = 2'-deoxyguanosine-3'-phosphorothioate
  modified_base 3: mod_base = OTHER; note = 2'-O-methyluridine-3'-phosphate
  modified_base 4: mod_base = OTHER; note = 2'-O-methylcytidine-3'-phosphate
  modified_base 6: mod_base = OTHER; note = 2'-O-methyladenosine-3'-phosphate
  modified_base 8: mod_base = OTHER; note = 2'-O-methyluridine-3'-phosphate
  modified_base 9: mod_base = OTHER; note = 2'-O-methylguanosine-3'-phosphate
  modified_base 10: mod_base = OTHER; note = 2'-O-methyladenosine-3'-phosphate
  modified_base 11: mod_base = OTHER; note = 2'-O-methylguanosine-3'-phosphate
  modified_base 13: mod_base = OTHER; note = 2'-O-methylcytidine-3'-phosphate
  modified_base 14: mod_base = OTHER; note = 2'-fluoroadenosine-3'-phosphate
  modified_base 15: mod_base = OTHER; note = 2'-O-methyluridine-3'-phosphate
  modified_base 16: mod_base = OTHER; note = 2'-O-methyladenosine-3'-phosphate
  modified_base 17: mod_base = OTHER; note = 2'-O-methyluridine-3'-phosphate
  modified_base 18: mod_base = OTHER; note = 2'-O-methyluridine-3'-phosphate
  modified_base 19: mod_base = OTHER; note = 2'-O-methylguanosine-3'-phosphate
  modified_base 20: mod_base = OTHER; note = 2'-O-methylcytidine-3'-phosphate
  modified_base 21: mod_base = OTHER; note = 2'-O-methylcytidine-3'-phosphorothioate
  modified_base 22: mod_base = OTHER; note = 2'-O-methyladenosine-3'-phosphorothioate
  modified_base 23: mod_base = OTHER; note = 2'-O-methylguanosine-3'-phosphate
  misc_feature 1: note = RNA
  misc_feature 2: note = DNA
  misc_feature 3..4: note = RNA
  misc_feature 5: note = DNA
  misc_feature 6: note = RNA
  misc_feature 7: note = DNA
  misc_feature 8..11: note = RNA
  misc_feature 12: note = DNA
  misc_feature 13..23: note = RNA
agtcaagtgagtcatattgccag

SEQ ID NO: 7650 - DNA, 23 bp, synthetic construct
  source 1..23: mol_type = other DNA
  modified_base 1: mod_base = OTHER; note = 2'-O-methyladenosine-3'-phosphorothioate
  modified_base 2: mod_base = OTHER; note = 2'-deoxyguanosine-3'-phosphorothioate
  modified_base 3: mod_base = OTHER; note = 2'-O-methylguanosine-3'-phosphate
  modified_base 4: mod_base = OTHER; note = 2'-O-methyluridine-3'-phosphate
  modified_base 6: mod_base = OTHER; note = 2'-O-methyladenosine-3'-phosphate
  modified_base 8: mod_base = OTHER; note = 2'-O-methylguanosine-3'-phosphate
  modified_base 9: mod_base = OTHER; note = 2'-O-methyluridine-3'-phosphate
  modified_base 10: mod_base = OTHER; note = 2'-O-methylguanosine-3'-phosphate
  modified_base 11: mod_base = OTHER; note = 2'-O-methyladenosine-3'-phosphate
  modified_base 13: mod_base = OTHER; note = 2'-O-methyluridine-3'-phosphate
  modified_base 14: mod_base = OTHER; note = 2'-fluorocytidine-3'-phosphate
  modified_base 15: mod_base = OTHER; note = 2'-O-methyladenosine-3'-phosphate
  modified_base 16: mod_base = OTHER; note = 2'-O-methyluridine-3'-phosphate
  modified_base 17: mod_base = OTHER; note = 2'-O-methyladenosine-3'-phosphate
  modified_base 18: mod_base = OTHER; note = 2'-O-methyluridine-3'-phosphate
  modified_base 19: mod_base = OTHER; note = 2'-O-methyluridine-3'-phosphate
  modified_base 20: mod_base = OTHER; note = 2'-O-methylguanosine-3'-phosphate
  modified_base 21: mod_base = OTHER; note = 2'-O-methylcytidine-3'-phosphorothioate
  modified_base 22: mod_base = OTHER; note = 2'-O-methylcytidine-3'-phosphorothioate
  modified_base 23: mod_base = OTHER; note = 2'-O-methyladenosine-3'-phosphate
  misc_feature 1: note = RNA
  misc_feature 2: note = DNA
  misc_feature 3..4: note = RNA
  misc_feature 5: note = DNA
  misc_feature 6: note = RNA
  misc_feature 7: note = DNA
  misc_feature 8..11: note = RNA
  misc_feature 12: note = DNA
  misc_feature 13..23: note = RNA
aggtcaagtgagtcatattgcca

SEQ ID NO: 7651 - DNA, 23 bp, synthetic construct
  source 1..23: mol_type = other DNA
  modified_base 1: mod_base = OTHER; note = 2'-O-methyladenosine-3'-phosphorothioate
  modified_base 2: mod_base = OTHER; note = 2'-deoxyguanosine-3'-phosphorothioate
  modified_base 3: mod_base = OTHER; note = 2'-O-methyladenosine-3'-phosphate
  modified_base 4: mod_base = OTHER; note = 2'-O-methyladenosine-3'-phosphate
  modified_base 6: mod_base = OTHER; note = 2'-O-methylguanosine-3'-phosphate
  modified_base 8: mod_base = OTHER; note = 2'-O-methylguanosine-3'-phosphate
  modified_base 9: mod_base = OTHER; note = 2'-O-methylcytidine-3'-phosphate
  modified_base 10: mod_base = OTHER; note = 2'-O-methylcytidine-3'-phosphate
  modified_base 11: mod_base = OTHER; note = 2'-O-methylcytidine-3'-phosphate
  modified_base 13: mod_base = OTHER; note = 2'-O-methyluridine-3'-phosphate
  modified_base 14: mod_base = OTHER; note = 2'-fluorouridine-3'-phosphate
  modified_base 15: mod_base = OTHER; note = 2'-O-methyluridine-3'-phosphate
  modified_base 16: mod_base = OTHER; note = 2'-O-methylguanosine-3'-phosphate
  modified_base 17: mod_base = OTHER; note = 2'-O-methylguanosine-3'-phosphate
  modified_base 18: mod_base = OTHER; note = 2'-O-methylguanosine-3'-phosphate
  modified_base 19: mod_base = OTHER; note = 2'-O-methyluridine-3'-phosphate
  modified_base 20: mod_base = OTHER; note = 2'-O-methylcytidine-3'-phosphate
  modified_base 21: mod_base = OTHER; note = 2'-O-methylcytidine-3'-phosphorothioate
  modified_base 22: mod_base = OTHER; note = 2'-O-methylcytidine-3'-phosphorothioate
  modified_base 23: mod_base = OTHER; note = 2'-O-methyladenosine-3'-phosphate
  misc_feature 1: note = RNA
  misc_feature 2: note = DNA
  misc_feature 3..4: note = RNA
  misc_feature 5: note = DNA
  misc_feature 6: note = RNA
  misc_feature 7: note = DNA
  misc_feature 8..11: note = RNA
  misc_feature 12: note = DNA
  misc_feature 13..23: note = RNA
agaaagtgcccatttgggtccca

SEQ ID NO: 7652 - DNA, 23 bp, synthetic construct
  source 1..23: mol_type = other DNA
  modified_base 1: mod_base = OTHER; note = 2'-O-methyladenosine-3'-phosphorothioate
  modified_base 2: mod_base = OTHER; note = 2'-deoxyadenosine-3'-phosphorothioate
  modified_base 3: mod_base = OTHER; note = 2'-O-methyladenosine-3'-phosphate
  modified_base 4: mod_base = OTHER; note = 2'-O-methylguanosine-3'-phosphate
  modified_base 6: mod_base = OTHER; note = 2'-O-methyladenosine-3'-phosphate
  modified_base 8: mod_base = OTHER; note = 2'-O-methylguanosine-3'-phosphate
  modified_base 9: mod_base = OTHER; note = 2'-O-methyluridine-3'-phosphate
  modified_base 10: mod_base = OTHER; note = 2'-O-methylguanosine-3'-phosphate
  modified_base 11: mod_base = OTHER; note = 2'-O-methylcytidine-3'-phosphate
  modified_base 13: mod_base = OTHER; note = 2'-O-methylcytidine-3'-phosphate
  modified_base 14: mod_base = OTHER; note = 2'-fluoroadenosine-3'-phosphate
  modified_base 15: mod_base = OTHER; note = 2'-O-methyluridine-3'-phosphate
  modified_base 16: mod_base = OTHER; note = 2'-O-methyluridine-3'-phosphate
  modified_base 17: mod_base = OTHER; note = 2'-O-methyluridine-3'-phosphate
  modified_base 18: mod_base = OTHER; note = 2'-O-methylguanosine-3'-phosphate
  modified_base 19: mod_base = OTHER; note = 2'-O-methylguanosine-3'-phosphate
  modified_base 20: mod_base = OTHER; note = 2'-O-methylguanosine-3'-phosphate
  modified_base 21: mod_base = OTHER; note = 2'-O-methyluridine-3'-phosphorothioate
  modified_base 22: mod_base = OTHER; note = 2'-O-methylcytidine-3'-phosphorothioate
  modified_base 23: mod_base = OTHER; note = 2'-O-methylcytidine-3'-phosphate
  misc_feature 1: note = RNA
  misc_feature 2: note = DNA
  misc_feature 3..4: note = RNA
  misc_feature 5: note = DNA
  misc_feature 6: note = RNA
  misc_feature 7: note = DNA
  misc_feature 8..11: note = RNA
  misc_feature 12: note = DNA
  misc_feature 13..23: note = RNA
aaagaaagtgcccatttgggtcc

SEQ ID NO: 7653 - DNA, 23 bp, synthetic construct
  source 1..23: mol_type = other DNA
  modified_base 1: mod_base = OTHER; note = 2'-O-methyladenosine-3'-phosphorothioate
  modified_base 2: mod_base = OTHER; note = 2'-deoxycytidine-3'-phosphorothioate
  modified_base 3: mod_base = OTHER; note = 2'-O-methyladenosine-3'-phosphate
  modified_base 4: mod_base = OTHER; note = 2'-O-methyladenosine-3'-phosphate
  modified_base 6: mod_base = OTHER; note = 2'-O-methyladenosine-3'-phosphate
  modified_base 8: mod_base = OTHER; note = 2'-O-methyladenosine-3'-phosphate
  modified_base 9: mod_base = OTHER; note = 2'-O-methylguanosine-3'-phosphate
  modified_base 10: mod_base = OTHER; note = 2'-O-methyluridine-3'-phosphate
  modified_base 11: mod_base = OTHER; note = 2'-O-methylguanosine-3'-phosphate
  modified_base 13: mod_base = OTHER; note = 2'-O-methylcytidine-3'-phosphate
  modified_base 14: mod_base = OTHER; note = 2'-fluorocytidine-3'-phosphate
  modified_base 15: mod_base = OTHER; note = 2'-O-methyladenosine-3'-phosphate
  modified_base 16: mod_base = OTHER; note = 2'-O-methyluridine-3'-phosphate
  modified_base 17: mod_base = OTHER; note = 2'-O-methyluridine-3'-phosphate
  modified_base 18: mod_base = OTHER; note = 2'-O-methyluridine-3'-phosphate
  modified_base 19: mod_base = OTHER; note = 2'-O-methylguanosine-3'-phosphate
  modified_base 20: mod_base = OTHER; note = 2'-O-methylguanosine-3'-phosphate
  modified_base 21: mod_base = OTHER; note = 2'-O-methylguanosine-3'-phosphorothioate
  modified_base 22: mod_base = OTHER; note = 2'-O-methyluridine-3'-phosphorothioate
  modified_base 23: mod_base = OTHER; note = 2'-O-methylcytidine-3'-phosphate
  misc_feature 1: note = RNA
  misc_feature 2: note = DNA
  misc_feature 3..4: note = RNA
  misc_feature 5: note = DNA
  misc_feature 6: note = RNA
  misc_feature 7: note = DNA
  misc_feature 8..11: note = RNA
  misc_feature 12: note = DNA
  misc_feature 13..23: note = RNA
acaagaaagtgcccatttgggtc

SEQ ID NO: 7654 - DNA, 23 bp, synthetic construct
  source 1..23: mol_type = other DNA
  modified_base 1: mod_base = OTHER; note = 2'-O-methyladenosine-3'-phosphorothioate
  modified_base 2: mod_base = OTHER; note = 2'-deoxyadenosine-3'-phosphorothioate
  modified_base 3: mod_base = OTHER; note = 2'-O-methylcytidine-3'-phosphate
  modified_base 4: mod_base = OTHER; note = 2'-O-methyladenosine-3'-phosphate
  modified_base 6: mod_base = OTHER; note = 2'-O-methylguanosine-3'-phosphate
  modified_base 8: mod_base = OTHER; note = 2'-O-methyladenosine-3'-phosphate
  modified_base 9: mod_base = OTHER; note = 2'-O-methyladenosine-3'-phosphate
  modified_base 10: mod_base = OTHER; note = 2'-O-methylguanosine-3'-phosphate
  modified_base 11: mod_base = OTHER; note = 2'-O-methyluridine-3'-phosphate
  modified_base 13: mod_base = OTHER; note = 2'-O-methylcytidine-3'-phosphate
  modified_base 14: mod_base = OTHER; note = 2'-fluorocytidine-3'-phosphate
  modified_base 15: mod_base = OTHER; note = 2'-O-methylcytidine-3'-phosphate
  modified_base 16: mod_base = OTHER; note = 2'-O-methyladenosine-3'-phosphate
  modified_base 17: mod_base = OTHER; note = 2'-O-methyluridine-3'-phosphate
  modified_base 18: mod_base = OTHER; note = 2'-O-methyluridine-3'-phosphate
  modified_base 19: mod_base = OTHER; note = 2'-O-methyluridine-3'-phosphate
  modified_base 20: mod_base = OTHER; note = 2'-O-methylguanosine-3'-phosphate
  modified_base 21: mod_base = OTHER; note = 2'-O-methylguanosine-3'-phosphorothioate
  modified_base 22: mod_base = OTHER; note = 2'-O-methylguanosine-3'-phosphorothioate
  modified_base 23: mod_base = OTHER; note = 2'-O-methyluridine-3'-phosphate
  misc_feature 1: note = RNA
  misc_feature 2: note = DNA
  misc_feature 3..4: note = RNA
  misc_feature 5: note = DNA
  misc_feature 6: note = RNA
  misc_feature 7: note = DNA
  misc_feature 8..11: note = RNA
  misc_feature 12: note = DNA
  misc_feature 13..23: note = RNA
aacaagaaagtgcccatttgggt

SEQ ID NO: 7655 - DNA, 23 bp, synthetic construct
  source 1..23: mol_type = other DNA
  modified_base 1: mod_base = OTHER; note = 2'-O-methyladenosine-3'-phosphorothioate
  modified_base 2: mod_base = OTHER; note = 2'-deoxyguanosine-3'-phosphorothioate
  modified_base 3: mod_base = OTHER; note = 2'-O-methyladenosine-3'-phosphate
  modified_base 4: mod_base = OTHER; note = 2'-O-methylcytidine-3'-phosphate
  modified_base 6: mod_base = OTHER; note = 2'-O-methyladenosine-3'-phosphate
  modified_base 8: mod_base = OTHER; note = 2'-O-methyladenosine-3'-phosphate
  modified_base 9: mod_base = OTHER; note = 2'-O-methyladenosine-3'-phosphate
  modified_base 10: mod_base = OTHER; note = 2'-O-methyladenosine-3'-phosphate
  modified_base 11: mod_base = OTHER; note = 2'-O-methylguanosine-3'-phosphate
  modified_base 13: mod_base = OTHER; note = 2'-O-methylguanosine-3'-phosphate
  modified_base 14: mod_base = OTHER; note = 2'-fluorocytidine-3'-phosphate
  modified_base 15: mod_base = OTHER; note = 2'-O-methylcytidine-3'-phosphate
  modified_base 16: mod_base = OTHER; note = 2'-O-methylcytidine-3'-phosphate
  modified_base 17: mod_base = OTHER; note = 2'-O-methyladenosine-3'-phosphate
  modified_base 18: mod_base = OTHER; note = 2'-O-methyluridine-3'-phosphate
  modified_base 19: mod_base = OTHER; note = 2'-O-methyluridine-3'-phosphate
  modified_base 20: mod_base = OTHER; note = 2'-O-methyluridine-3'-phosphate
  modified_base 21: mod_base = OTHER; note = 2'-O-methylguanosine-3'-phosphorothioate
  modified_base 22: mod_base = OTHER; note = 2'-O-methylguanosine-3'-phosphorothioate
  modified_base 23: mod_base = OTHER; note = 2'-O-methylguanosine-3'-phosphate
  misc_feature 1: note = RNA
  misc_feature 2: note = DNA
  misc_feature 3..4: note = RNA
  misc_feature 5: note = DNA
  misc_feature 6: note = RNA
  misc_feature 7: note = DNA
  misc_feature 8..11: note = RNA
  misc_feature 12: note = DNA
  misc_feature 13..23: note = RNA
agacaagaaagtgcccatttggg

SEQ ID NO: 7656 - DNA, 23 bp, synthetic construct
  source 1..23: mol_type = other DNA
  modified_base 1: mod_base = OTHER; note = 2'-O-methyladenosine-3'-phosphorothioate
  modified_base 2: mod_base = OTHER; note = 2'-deoxyadenosine-3'-phosphorothioate
  modified_base 3: mod_base = OTHER; note = 2'-O-methylguanosine-3'-phosphate
  modified_base 4: mod_base = OTHER; note = 2'-O-methyladenosine-3'-phosphate
  modified_base 6: mod_base = OTHER; note = 2'-O-methyladenosine-3'-phosphate
  modified_base 8: mod_base = OTHER; note = 2'-O-methylguanosine-3'-phosphate
  modified_base 9: mod_base = OTHER; note = 2'-O-methyladenosine-3'-phosphate
  modified_base 10: mod_base = OTHER; note = 2'-O-methyladenosine-3'-phosphate
  modified_base 11: mod_base = OTHER; note = 2'-O-methyladenosine-3'-phosphate
  modified_base 13: mod_base = OTHER; note = 2'-O-methyluridine-3'-phosphate
  modified_base 14: mod_base = OTHER; note = 2'-fluoroguanosine-3'-phosphate
  modified_base 15: mod_base = OTHER; note = 2'-O-methylcytidine-3'-phosphate
  modified_base 16: mod_base = OTHER; note = 2'-O-methylcytidine-3'-phosphate
  modified_base 17: mod_base = OTHER; note = 2'-O-methylcytidine-3'-phosphate
  modified_base 18: mod_base = OTHER; note = 2'-O-methyladenosine-3'-phosphate
  modified_base 19: mod_base = OTHER; note = 2'-O-methyluridine-3'-phosphate
  modified_base 20: mod_base = OTHER; note = 2'-O-methyluridine-3'-phosphate
  modified_base 21: mod_base = OTHER; note = 2'-O-methyluridine-3'-phosphorothioate
  modified_base 22: mod_base = OTHER; note = 2'-O-methylguanosine-3'-phosphorothioate
  modified_base 23: mod_base = OTHER; note = 2'-O-methylguanosine-3'-phosphate
  misc_feature 1: note = RNA
  misc_feature 2: note = DNA
  misc_feature 3..4: note = RNA
  misc_feature 5: note = DNA
  misc_feature 6: note = RNA
  misc_feature 7: note = DNA
  misc_feature 8..11: note = RNA
  misc_feature 12: note = DNA
  misc_feature 13..23: note = RNA
aagacaagaaagtgcccatttgg

SEQ ID NO: 7657 - DNA, 23 bp, synthetic construct
  source 1..23: mol_type = other DNA
  modified_base 1: mod_base = OTHER; note = 2'-O-methyladenosine-3'-phosphorothioate
  modified_base 2: mod_base = OTHER; note = 2'-deoxythimidine-3'-phosphorothioate
  modified_base 3: mod_base = OTHER; note = 2'-O-methylcytidine-3'-phosphate
  modified_base 4: mod_base = OTHER; note = 2'-O-methyladenosine-3'-phosphate
  modified_base 6: mod_base = OTHER; note = 2'-O-methyladenosine-3'-phosphate
  modified_base 8: mod_base = OTHER; note = 2'-O-methyladenosine-3'-phosphate
  modified_base 9: mod_base = OTHER; note = 2'-O-methyladenosine-3'-phosphate
  modified_base 10: mod_base = OTHER; note = 2'-O-methylguanosine-3'-phosphate
  modified_base 11: mod_base = OTHER; note = 2'-O-methyladenosine-3'-phosphate
  modified_base 13: mod_base = OTHER; note = 2'-O-methyladenosine-3'-phosphate
  modified_base 14: mod_base = OTHER; note = 2'-fluoroguanosine-3'-phosphate
  modified_base 15: mod_base = OTHER; note = 2'-O-methyluridine-3'-phosphate
  modified_base 16: mod_base = OTHER; note = 2'-O-methylguanosine-3'-phosphate
  modified_base 17: mod_base = OTHER; note = 2'-O-methylcytidine-3'-phosphate
  modified_base 18: mod_base = OTHER; note = 2'-O-methylcytidine-3'-phosphate
  modified_base 19: mod_base = OTHER; note = 2'-O-methylcytidine-3'-phosphate
  modified_base 20: mod_base = OTHER; note = 2'-O-methyladenosine-3'-phosphate
  modified_base 21: mod_base = OTHER; note = 2'-O-methyluridine-3'-phosphorothioate
  modified_base 22: mod_base = OTHER; note = 2'-O-methyluridine-3'-phosphorothioate
  modified_base 23: mod_base = OTHER; note = 2'-O-methyluridine-3'-phosphate
  misc_feature 1: note = RNA
  misc_feature 2: note = DNA
  misc_feature 3..4: note = RNA
  misc_feature 5: note = DNA
  misc_feature 6: note = RNA
  misc_feature 7: note = DNA
  misc_feature 8..11: note = RNA
  misc_feature 12: note = DNA
  misc_feature 13..23: note = RNA
atcagacaagaaagtgcccattt

SEQ ID NO: 7658 - DNA, 23 bp, synthetic construct
  source 1..23: mol_type = other DNA
  modified_base 1: mod_base = OTHER; note = 2'-O-methyladenosine-3'-phosphorothioate
  modified_base 2: mod_base = OTHER; note = 2'-deoxycytidine-3'-phosphorothioate
  modified_base 3: mod_base = OTHER; note = 2'-O-methyluridine-3'-phosphate
  modified_base 4: mod_base = OTHER; note = 2'-O-methylcytidine-3'-phosphate
  modified_base 6: mod_base = OTHER; note = 2'-O-methylguanosine-3'-phosphate
  modified_base 8: mod_base = OTHER; note = 2'-O-methylcytidine-3'-phosphate
  modified_base 9: mod_base = OTHER; note = 2'-O-methyladenosine-3'-phosphate
  modified_base 10: mod_base = OTHER; note = 2'-O-methyladenosine-3'-phosphate
  modified_base 11: mod_base = OTHER; note = 2'-O-methylguanosine-3'-phosphate
  modified_base 13: mod_base = OTHER; note = 2'-O-methyladenosine-3'-phosphate
  modified_base 14: mod_base = OTHER; note = 2'-fluoroadenosine-3'-phosphate
  modified_base 15: mod_base = OTHER; note = 2'-O-methylguanosine-3'-phosphate
  modified_base 16: mod_base = OTHER; note = 2'-O-methyluridine-3'-phosphate
  modified_base 17: mod_base = OTHER; note = 2'-O-methylguanosine-3'-phosphate
  modified_base 18: mod_base = OTHER; note = 2'-O-methylcytidine-3'-phosphate
  modified_base 19: mod_base = OTHER; note = 2'-O-methylcytidine-3'-phosphate
  modified_base 20: mod_base = OTHER; note = 2'-O-methylcytidine-3'-phosphate
  modified_base 21: mod_base = OTHER; note = 2'-O-methyladenosine-3'-phosphorothioate
  modified_base 22: mod_base = OTHER; note = 2'-O-methyluridine-3'-phosphorothioate
  modified_base 23: mod_base = OTHER; note = 2'-O-methyluridine-3'-phosphate
  misc_feature 1: note = RNA
  misc_feature 2: note = DNA
  misc_feature 3..4: note = RNA
  misc_feature 5: note = DNA
  misc_feature 6: note = RNA
  misc_feature 7: note = DNA
  misc_feature 8..11: note = RNA
  misc_feature 12: note = DNA
  misc_feature 13..23: note = RNA
actcagacaagaaagtgcccatt

SEQ ID NO: 7659 - DNA, 23 bp, synthetic construct
  source 1..23: mol_type = other DNA
  modified_base 1: mod_base = OTHER; note = 2'-O-methyladenosine-3'-phosphorothioate
  modified_base 2: mod_base = OTHER; note = 2'-deoxythimidine-3'-phosphorothioate
  modified_base 3: mod_base = OTHER; note = 2'-O-methylcytidine-3'-phosphate
  modified_base 4: mod_base = OTHER; note = 2'-O-methyluridine-3'-phosphate
  modified_base 6: mod_base = OTHER; note = 2'-O-methyladenosine-3'-phosphate
  modified_base 8: mod_base = OTHER; note = 2'-O-methyladenosine-3'-phosphate
  modified_base 9: mod_base = OTHER; note = 2'-O-methylcytidine-3'-phosphate
  modified_base 10: mod_base = OTHER; note = 2'-O-methyladenosine-3'-phosphate
  modified_base 11: mod_base = OTHER; note = 2'-O-methyladenosine-3'-phosphate
  modified_base 13: mod_base = OTHER; note = 2'-O-methyladenosine-3'-phosphate
  modified_base 14: mod_base = OTHER; note = 2'-fluoroadenosine-3'-phosphate
  modified_base 15: mod_base = OTHER; note = 2'-O-methyladenosine-3'-phosphate
  modified_base 16: mod_base = OTHER; note = 2'-O-methylguanosine-3'-phosphate
  modified_base 17: mod_base = OTHER; note = 2'-O-methyluridine-3'-phosphate
  modified_base 18: mod_base = OTHER; note = 2'-O-methylguanosine-3'-phosphate
  modified_base 19: mod_base = OTHER; note = 2'-O-methylcytidine-3'-phosphate
  modified_base 20: mod_base = OTHER; note = 2'-O-methylcytidine-3'-phosphate
  modified_base 21: mod_base = OTHER; note = 2'-O-methylcytidine-3'-phosphorothioate
  modified_base 22: mod_base = OTHER; note = 2'-O-methyladenosine-3'-phosphorothioate
  modified_base 23: mod_base = OTHER; note = 2'-O-methyluridine-3'-phosphate
  misc_feature 1: note = RNA
  misc_feature 2: note = DNA
  misc_feature 3..4: note = RNA
  misc_feature 5: note = DNA
  misc_feature 6: note = RNA
  misc_feature 7: note = DNA
  misc_feature 8..11: note = RNA
  misc_feature 12: note = DNA
  misc_feature 13..23: note = RNA
atctcagacaagaaagtgcccat

SEQ ID NO: 7660 - DNA, 23 bp, synthetic construct
  source 1..23: mol_type = other DNA
  modified_base 1: mod_base = OTHER; note = 2'-O-methyladenosine-3'-phosphorothioate
  modified_base 2: mod_base = OTHER; note = 2'-deoxyguanosine-3'-phosphorothioate
  modified_base 3: mod_base = OTHER; note = 2'-O-methyluridine-3'-phosphate
  modified_base 4: mod_base = OTHER; note = 2'-O-methylcytidine-3'-phosphate
  modified_base 6: mod_base = OTHER; note = 2'-O-methylcytidine-3'-phosphate
  modified_base 8: mod_base = OTHER; note = 2'-O-methylguanosine-3'-phosphate
  modified_base 9: mod_base = OTHER; note = 2'-O-methyladenosine-3'-phosphate
  modified_base 10: mod_base = OTHER; note = 2'-O-methylcytidine-3'-phosphate
  modified_base 11: mod_base = OTHER; note = 2'-O-methyladenosine-3'-phosphate
  modified_base 13: mod_base = OTHER; note = 2'-O-methylguanosine-3'-phosphate
  modified_base 14: mod_base = OTHER; note = 2'-fluoroadenosine-3'-phosphate
  modified_base 15: mod_base = OTHER; note = 2'-O-methyladenosine-3'-phosphate
  modified_base 16: mod_base = OTHER; note = 2'-O-methyladenosine-3'-phosphate
  modified_base 17: mod_base = OTHER; note = 2'-O-methylguanosine-3'-phosphate
  modified_base 18: mod_base = OTHER; note = 2'-O-methyluridine-3'-phosphate
  modified_base 19: mod_base = OTHER; note = 2'-O-methylguanosine-3'-phosphate
  modified_base 20: mod_base = OTHER; note = 2'-O-methylcytidine-3'-phosphate
  modified_base 21: mod_base = OTHER; note = 2'-O-methylcytidine-3'-phosphorothioate
  modified_base 22: mod_base = OTHER; note = 2'-O-methylcytidine-3'-phosphorothioate
  modified_base 23: mod_base = OTHER; note = 2'-O-methyladenosine-3'-phosphate
  misc_feature 1: note = RNA
  misc_feature 2: note = DNA
  misc_feature 3..4: note = RNA
  misc_feature 5: note = DNA
  misc_feature 6: note = RNA
  misc_feature 7: note = DNA
  misc_feature 8..11: note = RNA
  misc_feature 12: note = DNA
  misc_feature 13..23: note = RNA
agtctcagacaagaaagtgccca

SEQ ID NO: 7661 - DNA, 23 bp, synthetic construct
  source 1..23: mol_type = other DNA
  modified_base 1: mod_base = OTHER; note = 2'-O-methyladenosine-3'-phosphorothioate
  modified_base 2: mod_base = OTHER; note = 2'-deoxyadenosine-3'-phosphorothioate
  modified_base 3: mod_base = OTHER; note = 2'-O-methylguanosine-3'-phosphate
  modified_base 4: mod_base = OTHER; note = 2'-O-methyluridine-3'-phosphate
  modified_base 6: mod_base = OTHER; note = 2'-O-methyluridine-3'-phosphate
  modified_base 8: mod_base = OTHER; note = 2'-O-methyladenosine-3'-phosphate
  modified_base 9: mod_base = OTHER; note = 2'-O-methylguanosine-3'-phosphate
  modified_base 10: mod_base = OTHER; note = 2'-O-methyladenosine-3'-phosphate
  modified_base 11: mod_base = OTHER; note = 2'-O-methylcytidine-3'-phosphate
  modified_base 13: mod_base = OTHER; note = 2'-O-methyladenosine-3'-phosphate
  modified_base 14: mod_base = OTHER; note = 2'-fluoroguanosine-3'-phosphate
  modified_base 15: mod_base = OTHER; note = 2'-O-methyladenosine-3'-phosphate
  modified_base 16: mod_base = OTHER; note = 2'-O-methyladenosine-3'-phosphate
  modified_base 17: mod_base = OTHER; note = 2'-O-methyladenosine-3'-phosphate
  modified_base 18: mod_base = OTHER; note = 2'-O-methylguanosine-3'-phosphate
  modified_base 19: mod_base = OTHER; note = 2'-O-methyluridine-3'-phosphate
  modified_base 20: mod_base = OTHER; note = 2'-O-methylguanosine-3'-phosphate
  modified_base 21: mod_base = OTHER; note = 2'-O-methylcytidine-3'-phosphorothioate
  modified_base 22: mod_base = OTHER; note = 2'-O-methylcytidine-3'-phosphorothioate
  modified_base 23: mod_base = OTHER; note = 2'-O-methylcytidine-3'-phosphate
  misc_feature 1: note = RNA
  misc_feature 2: note = DNA
  misc_feature 3..4: note = RNA
  misc_feature 5: note = DNA
  misc_feature 6: note = RNA
  misc_feature 7: note = DNA
  misc_feature 8..11: note = RNA
  misc_feature 12: note = DNA
  misc_feature 13..23: note = RNA
aagtctcagacaagaaagtgccc

SEQ ID NO: 7662 - DNA, 23 bp, synthetic construct
  source 1..23: mol_type = other DNA
  modified_base 1: mod_base = OTHER; note = 2'-O-methyladenosine-3'-phosphorothioate
  modified_base 2: mod_base = OTHER; note = 2'-deoxyguanosine-3'-phosphorothioate
  modified_base 3: mod_base = OTHER; note = 2'-O-methyladenosine-3'-phosphate
  modified_base 4: mod_base = OTHER; note = 2'-O-methylguanosine-3'-phosphate
  modified_base 6: mod_base = OTHER; note = 2'-O-methylcytidine-3'-phosphate
  modified_base 8: mod_base = OTHER; note = 2'-O-methylcytidine-3'-phosphate
  modified_base 9: mod_base = OTHER; note = 2'-O-methyladenosine-3'-phosphate
  modified_base 10: mod_base = OTHER; note = 2'-O-methylguanosine-3'-phosphate
  modified_base 11: mod_base = OTHER; note = 2'-O-methyladenosine-3'-phosphate
  modified_base 13: mod_base = OTHER; note = 2'-O-methyladenosine-3'-phosphate
  modified_base 14: mod_base = OTHER; note = 2'-fluoroadenosine-3'-phosphate
  modified_base 15: mod_base = OTHER; note = 2'-O-methylguanosine-3'-phosphate
  modified_base 16: mod_base = OTHER; note = 2'-O-methyladenosine-3'-phosphate
  modified_base 17: mod_base = OTHER; note = 2'-O-methyladenosine-3'-phosphate
  modified_base 18: mod_base = OTHER; note = 2'-O-methyladenosine-3'-phosphate
  modified_base 19: mod_base = OTHER; note = 2'-O-methylguanosine-3'-phosphate
  modified_base 20: mod_base = OTHER; note = 2'-O-methyluridine-3'-phosphate
  modified_base 21: mod_base = OTHER; note = 2'-O-methylguanosine-3'-phosphorothioate
  modified_base 22: mod_base = OTHER; note = 2'-O-methylcytidine-3'-phosphorothioate
  modified_base 23: mod_base = OTHER; note = 2'-O-methylcytidine-3'-phosphate
  misc_feature 1: note = RNA
  misc_feature 2: note = DNA
  misc_feature 3..4: note = RNA
  misc_feature 5: note = DNA
  misc_feature 6: note = RNA
  misc_feature 7: note = DNA
  misc_feature 8..11: note = RNA
  misc_feature 12: note = DNA
  misc_feature 13..23: note = RNA
agagtctcagacaagaaagtgcc

SEQ ID NO: 7663 - DNA, 23 bp, synthetic construct
  source 1..23: mol_type = other DNA
  modified_base 1: mod_base = OTHER; note = 2'-O-methyladenosine-3'-phosphorothioate
  modified_base 2: mod_base = OTHER; note = 2'-deoxyadenosine-3'-phosphorothioate
  modified_base 3: mod_base = OTHER; note = 2'-O-methylguanosine-3'-phosphate
  modified_base 4: mod_base = OTHER; note = 2'-O-methyladenosine-3'-phosphate
  modified_base 6: mod_base = OTHER; note = 2'-O-methyluridine-3'-phosphate
  modified_base 8: mod_base = OTHER; note = 2'-O-methyluridine-3'-phosphate
  modified_base 9: mod_base = OTHER; note = 2'-O-methylcytidine-3'-phosphate
  modified_base 10: mod_base = OTHER; note = 2'-O-methyladenosine-3'-phosphate
  modified_base 11: mod_base = OTHER; note = 2'-O-methylguanosine-3'-phosphate
  modified_base 13: mod_base = OTHER; note = 2'-O-methylcytidine-3'-phosphate
  modified_base 14: mod_base = OTHER; note = 2'-fluoroadenosine-3'-phosphate
  modified_base 15: mod_base = OTHER; note = 2'-O-methyladenosine-3'-phosphate
  modified_base 16: mod_base = OTHER; note = 2'-O-methylguanosine-3'-phosphate
  modified_base 17: mod_base = OTHER; note = 2'-O-methyladenosine-3'-phosphate
  modified_base 18: mod_base = OTHER; note = 2'-O-methyladenosine-3'-phosphate
  modified_base 19: mod_base = OTHER; note = 2'-O-methyladenosine-3'-phosphate
  modified_base 20: mod_base = OTHER; note = 2'-O-methylguanosine-3'-phosphate
  modified_base 21: mod_base = OTHER; note = 2'-O-methyluridine-3'-phosphorothioate
  modified_base 22: mod_base = OTHER; note = 2'-O-methylguanosine-3'-phosphorothioate
  modified_base 23: mod_base = OTHER; note = 2'-O-methylcytidine-3'-phosphate
  misc_feature 1: note = RNA
  misc_feature 2: note = DNA
  misc_feature 3..4: note = RNA
  misc_feature 5: note = DNA
  misc_feature 6: note = RNA
  misc_feature 7: note = DNA
  misc_feature 8..11: note = RNA
  misc_feature 12: note = DNA
  misc_feature 13..23: note = RNA
aagagtctcagacaagaaagtgc

SEQ ID NO: 7664 - DNA, 23 bp, synthetic construct
  source 1..23: mol_type = other DNA
  modified_base 1: mod_base = OTHER; note = 2'-O-methyladenosine-3'-phosphorothioate
  modified_base 2: mod_base = OTHER; note = 2'-deoxycytidine-3'-phosphorothioate
  modified_base 3: mod_base = OTHER; note = 2'-O-methyladenosine-3'-phosphate
  modified_base 4: mod_base = OTHER; note = 2'-O-methylguanosine-3'-phosphate
  modified_base 6: mod_base = OTHER; note = 2'-O-methylguanosine-3'-phosphate
  modified_base 8: mod_base = OTHER; note = 2'-O-methylcytidine-3'-phosphate
  modified_base 9: mod_base = OTHER; note = 2'-O-methyluridine-3'-phosphate
  modified_base 10: mod_base = OTHER; note = 2'-O-methylcytidine-3'-phosphate
  modified_base 11: mod_base = OTHER; note = 2'-O-methyladenosine-3'-phosphate
  modified_base 13: mod_base = OTHER; note = 2'-O-methyladenosine-3'-phosphate
  modified_base 14: mod_base = OTHER; note = 2'-fluorocytidine-3'-phosphate
  modified_base 15: mod_base = OTHER; note = 2'-O-methyladenosine-3'-phosphate
  modified_base 16: mod_base = OTHER; note = 2'-O-methyladenosine-3'-phosphate
  modified_base 17: mod_base = OTHER; note = 2'-O-methylguanosine-3'-phosphate
  modified_base 18: mod_base = OTHER; note = 2'-O-methyladenosine-3'-phosphate
  modified_base 19: mod_base = OTHER; note = 2'-O-methyladenosine-3'-phosphate
  modified_base 20: mod_base = OTHER; note = 2'-O-methyladenosine-3'-phosphate
  modified_base 21: mod_base = OTHER; note = 2'-O-methylguanosine-3'-phosphorothioate
  modified_base 22: mod_base = OTHER; note = 2'-O-methyluridine-3'-phosphorothioate
  modified_base 23: mod_base = OTHER; note = 2'-O-methylguanosine-3'-phosphate
  misc_feature 1: note = RNA
  misc_feature 2: note = DNA
  misc_feature 3..4: note = RNA
  misc_feature 5: note = DNA
  misc_feature 6: note = RNA
  misc_feature 7: note = DNA
  misc_feature 8..11: note = RNA
  misc_feature 12: note = DNA
  misc_feature 13..23: note = RNA
acagagtctcagacaagaaagtg

SEQ ID NO: 7665 - DNA, 23 bp, synthetic construct
  source 1..23: mol_type = other DNA
  modified_base 1: mod_base = OTHER; note = 2'-O-methyladenosine-3'-phosphorothioate
  modified_base 2: mod_base = OTHER; note = 2'-deoxycytidine-3'-phosphorothioate
  modified_base 3: mod_base = OTHER; note = 2'-O-methylcytidine-3'-phosphate
  modified_base 4: mod_base = OTHER; note = 2'-O-methyladenosine-3'-phosphate
  modified_base 6: mod_base = OTHER; note = 2'-O-methyladenosine-3'-phosphate
  modified_base 8: mod_base = OTHER; note = 2'-O-methyluridine-3'-phosphate
  modified_base 9: mod_base = OTHER; note = 2'-O-methylcytidine-3'-phosphate
  modified_base 10: mod_base = OTHER; note = 2'-O-methyluridine-3'-phosphate
  modified_base 11: mod_base = OTHER; note = 2'-O-methylcytidine-3'-phosphate
  modified_base 13: mod_base = OTHER; note = 2'-O-methylguanosine-3'-phosphate
  modified_base 14: mod_base = OTHER; note = 2'-fluoroadenosine-3'-phosphate
  modified_base 15: mod_base = OTHER; note = 2'-O-methylcytidine-3'-phosphate
  modified_base 16: mod_base = OTHER; note = 2'-O-methyladenosine-3'-phosphate
  modified_base 17: mod_base = OTHER; note = 2'-O-methyladenosine-3'-phosphate
  modified_base 18: mod_base = OTHER; note = 2'-O-methylguanosine-3'-phosphate
  modified_base 19: mod_base = OTHER; note = 2'-O-methyladenosine-3'-phosphate
  modified_base 20: mod_base = OTHER; note = 2'-O-methyladenosine-3'-phosphate
  modified_base 21: mod_base = OTHER; note = 2'-O-methyladenosine-3'-phosphorothioate
  modified_base 22: mod_base = OTHER; note = 2'-O-methylguanosine-3'-phosphorothioate
  modified_base 23: mod_base = OTHER; note = 2'-O-methyluridine-3'-phosphate
  misc_feature 1: note = RNA
  misc_feature 2: note = DNA
  misc_feature 3..4: note = RNA
  misc_feature 5: note = DNA
  misc_feature 6: note = RNA
  misc_feature 7: note = DNA
  misc_feature 8..11: note = RNA
  misc_feature 12: note = DNA
  misc_feature 13..23: note = RNA
accagagtctcagacaagaaagt

SEQ ID NO: 7666 - DNA, 23 bp, synthetic construct
  source 1..23: mol_type = other DNA
  modified_base 1: mod_base = OTHER; note = 2'-O-methyladenosine-3'-phosphorothioate
  modified_base 2: mod_base = OTHER; note = 2'-deoxyguanosine-3'-phosphorothioate
  modified_base 3: mod_base = OTHER; note = 2'-O-methylcytidine-3'-phosphate
  modified_base 4: mod_base = OTHER; note = 2'-O-methylcytidine-3'-phosphate
  modified_base 6: mod_base = OTHER; note = 2'-O-methylguanosine-3'-phosphate
  modified_base 8: mod_base = OTHER; note = 2'-O-methylguanosine-3'-phosphate
  modified_base 9: mod_base = OTHER; note = 2'-O-methyluridine-3'-phosphate
  modified_base 10: mod_base = OTHER; note = 2'-O-methylcytidine-3'-phosphate
  modified_base 11: mod_base = OTHER; note = 2'-O-methyluridine-3'-phosphate
  modified_base 13: mod_base = OTHER; note = 2'-O-methyladenosine-3'-phosphate
  modified_base 14: mod_base = OTHER; note = 2'-fluoroguanosine-3'-phosphate
  modified_base 15: mod_base = OTHER; note = 2'-O-methyladenosine-3'-phosphate
  modified_base 16: mod_base = OTHER; note = 2'-O-methylcytidine-3'-phosphate
  modified_base 17: mod_base = OTHER; note = 2'-O-methyladenosine-3'-phosphate
  modified_base 18: mod_base = OTHER; note = 2'-O-methyladenosine-3'-phosphate
  modified_base 19: mod_base = OTHER; note = 2'-O-methylguanosine-3'-phosphate
  modified_base 20: mod_base = OTHER; note = 2'-O-methyladenosine-3'-phosphate
  modified_base 21: mod_base = OTHER; note = 2'-O-methyladenosine-3'-phosphorothioate
  modified_base 22: mod_base = OTHER; note = 2'-O-methyladenosine-3'-phosphorothioate
  modified_base 23: mod_base = OTHER; note = 2'-O-methylguanosine-3'-phosphate
  misc_feature 1: note = RNA
  misc_feature 2: note = DNA
  misc_feature 3..4: note = RNA
  misc_feature 5: note = DNA
  misc_feature 6: note = RNA
  misc_feature 7: note = DNA
  misc_feature 8..11: note = RNA
  misc_feature 12: note = DNA
  misc_feature 13..23: note = RNA
agccagagtctcagacaagaaag

SEQ ID NO: 7667 - DNA, 23 bp, synthetic construct
  source 1..23: mol_type = other DNA
  modified_base 1: mod_base = OTHER; note = 2'-O-methyladenosine-3'-phosphorothioate
  modified_base 2: mod_base = OTHER; note = 2'-deoxyadenosine-3'-phosphorothioate
  modified_base 3: mod_base = OTHER; note = 2'-O-methylguanosine-3'-phosphate
  modified_base 4: mod_base = OTHER; note = 2'-O-methylcytidine-3'-phosphate
  modified_base 6: mod_base = OTHER; note = 2'-O-methyladenosine-3'-phosphate
  modified_base 8: mod_base = OTHER; note = 2'-O-methyladenosine-3'-phosphate
  modified_base 9: mod_base = OTHER; note = 2'-O-methylguanosine-3'-phosphate
  modified_base 10: mod_base = OTHER; note = 2'-O-methyluridine-3'-phosphate
  modified_base 11: mod_base = OTHER; note = 2'-O-methylcytidine-3'-phosphate
  modified_base 13: mod_base = OTHER; note = 2'-O-methylcytidine-3'-phosphate
  modified_base 14: mod_base = OTHER; note = 2'-fluoroadenosine-3'-phosphate
  modified_base 15: mod_base = OTHER; note = 2'-O-methylguanosine-3'-phosphate
  modified_base 16: mod_base = OTHER; note = 2'-O-methyladenosine-3'-phosphate
  modified_base 17: mod_base = OTHER; note = 2'-O-methylcytidine-3'-phosphate
  modified_base 18: mod_base = OTHER; note = 2'-O-methyladenosine-3'-phosphate
  modified_base 19: mod_base = OTHER; note = 2'-O-methyladenosine-3'-phosphate
  modified_base 20: mod_base = OTHER; note = 2'-O-methylguanosine-3'-phosphate
  modified_base 21: mod_base = OTHER; note = 2'-O-methyladenosine-3'-phosphorothioate
  modified_base 22: mod_base = OTHER; note = 2'-O-methyladenosine-3'-phosphorothioate
  modified_base 23: mod_base = OTHER; note = 2'-O-methyladenosine-3'-phosphate
  misc_feature 1: note = RNA
  misc_feature 2: note = DNA
  misc_feature 3..4: note = RNA
  misc_feature 5: note = DNA
  misc_feature 6: note = RNA
  misc_feature 7: note = DNA
  misc_feature 8..11: note = RNA
  misc_feature 12: note = DNA
  misc_feature 13..23: note = RNA
aagccagagtctcagacaagaaa

SEQ ID NO: 7668 - DNA, 23 bp, synthetic construct
  source 1..23: mol_type = other DNA
  modified_base 1: mod_base = OTHER; note = 2'-O-methyladenosine-3'-phosphorothioate
  modified_base 2: mod_base = OTHER; note = 2'-deoxyadenosine-3'-phosphorothioate
  modified_base 3: mod_base = OTHER; note = 2'-O-methyladenosine-3'-phosphate
  modified_base 4: mod_base = OTHER; note = 2'-O-methylguanosine-3'-phosphate
  modified_base 6: mod_base = OTHER; note = 2'-O-methylcytidine-3'-phosphate
  modified_base 8: mod_base = OTHER; note = 2'-O-methylguanosine-3'-phosphate
  modified_base 9: mod_base = OTHER; note = 2'-O-methyladenosine-3'-phosphate
  modified_base 10: mod_base = OTHER; note = 2'-O-methylguanosine-3'-phosphate
  modified_base 11: mod_base = OTHER; note = 2'-O-methyluridine-3'-phosphate
  modified_base 13: mod_base = OTHER; note = 2'-O-methyluridine-3'-phosphate
  modified_base 14: mod_base = OTHER; note = 2'-fluorocytidine-3'-phosphate
  modified_base 15: mod_base = OTHER; note = 2'-O-methyladenosine-3'-phosphate
  modified_base 16: mod_base = OTHER; note = 2'-O-methylguanosine-3'-phosphate
  modified_base 17: mod_base = OTHER; note = 2'-O-methyladenosine-3'-phosphate
  modified_base 18: mod_base = OTHER; note = 2'-O-methylcytidine-3'-phosphate
  modified_base 19: mod_base = OTHER; note = 2'-O-methyladenosine-3'-phosphate
  modified_base 20: mod_base = OTHER; note = 2'-O-methyladenosine-3'-phosphate
  modified_base 21: mod_base = OTHER; note = 2'-O-methylguanosine-3'-phosphorothioate
  modified_base 22: mod_base = OTHER; note = 2'-O-methyladenosine-3'-phosphorothioate
  modified_base 23: mod_base = OTHER; note = 2'-O-methyladenosine-3'-phosphate
  misc_feature 1: note = RNA
  misc_feature 2: note = DNA
  misc_feature 3..4: note = RNA
  misc_feature 5: note = DNA
  misc_feature 6: note = RNA
  misc_feature 7: note = DNA
  misc_feature 8..11: note = RNA
  misc_feature 12: note = DNA
  misc_feature 13..23: note = RNA
aaagccagagtctcagacaagaa

SEQ ID NO: 7669 - DNA, 23 bp, synthetic construct
  source 1..23: mol_type = other DNA
  modified_base 1: mod_base = OTHER; note = 2'-O-methyladenosine-3'-phosphorothioate
  modified_base 2: mod_base = OTHER; note = 2'-deoxyadenosine-3'-phosphorothioate
  modified_base 3: mod_base = OTHER; note = 2'-O-methylcytidine-3'-phosphate
  modified_base 4: mod_base = OTHER; note = 2'-O-methyladenosine-3'-phosphate
  modified_base 6: mod_base = OTHER; note = 2'-O-methylcytidine-3'-phosphate
  modified_base 8: mod_base = OTHER; note = 2'-O-methylguanosine-3'-phosphate
  modified_base 9: mod_base = OTHER; note = 2'-O-methylcytidine-3'-phosphate
  modified_base 10: mod_base = OTHER; note = 2'-O-methylcytidine-3'-phosphate
  modified_base 11: mod_base = OTHER; note = 2'-O-methyladenosine-3'-phosphate
  modified_base 13: mod_base = OTHER; note = 2'-O-methylcytidine-3'-phosphate
  modified_base 14: mod_base = OTHER; note = 2'-fluorocytidine-3'-phosphate
  modified_base 15: mod_base = OTHER; note = 2'-O-methyluridine-3'-phosphate
  modified_base 16: mod_base = OTHER; note = 2'-O-methylguanosine-3'-phosphate
  modified_base 17: mod_base = OTHER; note = 2'-O-methylguanosine-3'-phosphate
  modified_base 18: mod_base = OTHER; note = 2'-O-methyladenosine-3'-phosphate
  modified_base 19: mod_base = OTHER; note = 2'-O-methyladenosine-3'-phosphate
  modified_base 20: mod_base = OTHER; note = 2'-O-methyluridine-3'-phosphate
  modified_base 21: mod_base = OTHER; note = 2'-O-methyladenosine-3'-phosphorothioate
  modified_base 22: mod_base = OTHER; note = 2'-O-methyladenosine-3'-phosphorothioate
  modified_base 23: mod_base = OTHER; note = 2'-O-methylguanosine-3'-phosphate
  misc_feature 1: note = RNA
  misc_feature 2: note = DNA
  misc_feature 3..4: note = RNA
  misc_feature 5: note = DNA
  misc_feature 6: note = RNA
  misc_feature 7: note = DNA
  misc_feature 8..11: note = RNA
  misc_feature 12: note = DNA
  misc_feature 13..23: note = RNA
aacatcagccaacctggaataag

SEQ ID NO: 7670 - DNA, 23 bp, synthetic construct
  source 1..23: mol_type = other DNA
  modified_base 1: mod_base = OTHER; note = 2'-O-methyladenosine-3'-phosphorothioate
  modified_base 2: mod_base = OTHER; note = 2'-deoxycytidine-3'-phosphorothioate
  modified_base 3: mod_base = OTHER; note = 2'-O-methyladenosine-3'-phosphate
  modified_base 4: mod_base = OTHER; note = 2'-O-methylcytidine-3'-phosphate
  modified_base 6: mod_base = OTHER; note = 2'-O-methyluridine-3'-phosphate
  modified_base 8: mod_base = OTHER; note = 2'-O-methyladenosine-3'-phosphate
  modified_base 9: mod_base = OTHER; note = 2'-O-methylguanosine-3'-phosphate
  modified_base 10: mod_base = OTHER; note = 2'-O-methylcytidine-3'-phosphate
  modified_base 11: mod_base = OTHER; note = 2'-O-methylcytidine-3'-phosphate
  modified_base 13: mod_base = OTHER; note = 2'-O-methyladenosine-3'-phosphate
  modified_base 14: mod_base = OTHER; note = 2'-fluorocytidine-3'-phosphate
  modified_base 15: mod_base = OTHER; note = 2'-O-methylcytidine-3'-phosphate
  modified_base 16: mod_base = OTHER; note = 2'-O-methyluridine-3'-phosphate
  modified_base 17: mod_base = OTHER; note = 2'-O-methylguanosine-3'-phosphate
  modified_base 18: mod_base = OTHER; note = 2'-O-methylguanosine-3'-phosphate
  modified_base 19: mod_base = OTHER; note = 2'-O-methyladenosine-3'-phosphate
  modified_base 20: mod_base = OTHER; note = 2'-O-methyladenosine-3'-phosphate
  modified_base 21: mod_base = OTHER; note = 2'-O-methyluridine-3'-phosphorothioate
  modified_base 22: mod_base = OTHER; note = 2'-O-methyladenosine-3'-phosphorothioate
  modified_base 23: mod_base = OTHER; note = 2'-O-methyladenosine-3'-phosphate
  misc_feature 1: note = RNA
  misc_feature 2: note = DNA
  misc_feature 3..4: note = RNA
  misc_feature 5: note = DNA
  misc_feature 6: note = RNA
  misc_feature 7: note = DNA
  misc_feature 8..11: note = RNA
  misc_feature 12: note = DNA
  misc_feature 13..23: note = RNA
acacatcagccaacctggaataa

SEQ ID NO: 7671 - DNA, 23 bp, synthetic construct
  source 1..23: mol_type = other DNA
  modified_base 1: mod_base = OTHER; note = 2'-O-methyladenosine-3'-phosphorothioate
  modified_base 2: mod_base = OTHER; note = 2'-deoxyadenosine-3'-phosphorothioate
  modified_base 3: mod_base = OTHER; note = 2'-O-methylcytidine-3'-phosphate
  modified_base 4: mod_base = OTHER; note = 2'-O-methyladenosine-3'-phosphate
  modified_base 6: mod_base = OTHER; note = 2'-O-methyladenosine-3'-phosphate
  modified_base 8: mod_base = OTHER; note = 2'-O-methylcytidine-3'-phosphate
  modified_base 9: mod_base = OTHER; note = 2'-O-methyladenosine-3'-phosphate
  modified_base 10: mod_base = OTHER; note = 2'-O-methylguanosine-3'-phosphate
  modified_base 11: mod_base = OTHER; note = 2'-O-methylcytidine-3'-phosphate
  modified_base 13: mod_base = OTHER; note = 2'-O-methyladenosine-3'-phosphate
  modified_base 14: mod_base = OTHER; note = 2'-fluoroadenosine-3'-phosphate
  modified_base 15: mod_base = OTHER; note = 2'-O-methylcytidine-3'-phosphate
  modified_base 16: mod_base = OTHER; note = 2'-O-methylcytidine-3'-phosphate
  modified_base 17: mod_base = OTHER; note = 2'-O-methyluridine-3'-phosphate
  modified_base 18: mod_base = OTHER; note = 2'-O-methylguanosine-3'-phosphate
  modified_base 19: mod_base = OTHER; note = 2'-O-methylguanosine-3'-phosphate
  modified_base 20: mod_base = OTHER; note = 2'-O-methyladenosine-3'-phosphate
  modified_base 21: mod_base = OTHER; note = 2'-O-methyladenosine-3'-phosphorothioate
  modified_base 22: mod_base = OTHER; note = 2'-O-methyluridine-3'-phosphorothioate
  modified_base 23: mod_base = OTHER; note = 2'-O-methyladenosine-3'-phosphate
  misc_feature 1: note = RNA
  misc_feature 2: note = DNA
  misc_feature 3..4: note = RNA
  misc_feature 5: note = DNA
  misc_feature 6: note = RNA
  misc_feature 7: note = DNA
  misc_feature 8..11: note = RNA
  misc_feature 12: note = DNA
  misc_feature 13..23: note = RNA
aacacatcagccaacctggaata

SEQ ID NO: 7672 - DNA, 23 bp, synthetic construct
  source 1..23: mol_type = other DNA
  modified_base 1: mod_base = OTHER; note = 2'-O-methyladenosine-3'-phosphorothioate
  modified_base 2: mod_base = OTHER; note = 2'-deoxyadenosine-3'-phosphorothioate
  modified_base 3: mod_base = OTHER; note = 2'-O-methyladenosine-3'-phosphate
  modified_base 4: mod_base = OTHER; note = 2'-O-methylcytidine-3'-phosphate
  modified_base 6: mod_base = OTHER; note = 2'-O-methylcytidine-3'-phosphate
  modified_base 8: mod_base = OTHER; note = 2'-O-methyluridine-3'-phosphate
  modified_base 9: mod_base = OTHER; note = 2'-O-methylcytidine-3'-phosphate
  modified_base 10: mod_base = OTHER; note = 2'-O-methyladenosine-3'-phosphate
  modified_base 11: mod_base = OTHER; note = 2'-O-methylguanosine-3'-phosphate
  modified_base 13: mod_base = OTHER; note = 2'-O-methylcytidine-3'-phosphate
  modified_base 14: mod_base = OTHER; note = 2'-fluoroadenosine-3'-phosphate
  modified_base 15: mod_base = OTHER; note = 2'-O-methyladenosine-3'-phosphate
  modified_base 16: mod_base = OTHER; note = 2'-O-methylcytidine-3'-phosphate
  modified_base 17: mod_base = OTHER; note = 2'-O-methylcytidine-3'-phosphate
  modified_base 18: mod_base = OTHER; note = 2'-O-methyluridine-3'-phosphate
  modified_base 19: mod_base = OTHER; note = 2'-O-methylguanosine-3'-phosphate
  modified_base 20: mod_base = OTHER; note = 2'-O-methylguanosine-3'-phosphate
  modified_base 21: mod_base = OTHER; note = 2'-O-methyladenosine-3'-phosphorothioate
  modified_base 22: mod_base = OTHER; note = 2'-O-methyladenosine-3'-phosphorothioate
  modified_base 23: mod_base = OTHER; note = 2'-O-methyluridine-3'-phosphate
  misc_feature 1: note = RNA
  misc_feature 2: note = DNA
  misc_feature 3..4: note = RNA
  misc_feature 5: note = DNA
  misc_feature 6: note = RNA
  misc_feature 7: note = DNA
  misc_feature 8..11: note = RNA
  misc_feature 12: note = DNA
  misc_feature 13..23: note = RNA
aaacacatcagccaacctggaat

SEQ ID NO: 7673 - DNA, 23 bp, synthetic construct
  source 1..23: mol_type = other DNA
  modified_base 1: mod_base = OTHER; note = 2'-O-methyladenosine-3'-phosphorothioate
  modified_base 2: mod_base = OTHER; note = 2'-deoxycytidine-3'-phosphorothioate
  modified_base 3: mod_base = OTHER; note = 2'-O-methyladenosine-3'-phosphate
  modified_base 4: mod_base = OTHER; note = 2'-O-methyladenosine-3'-phosphate
  modified_base 6: mod_base = OTHER; note = 2'-O-methyladenosine-3'-phosphate
  modified_base 8: mod_base = OTHER; note = 2'-O-methyladenosine-3'-phosphate
  modified_base 9: mod_base = OTHER; note = 2'-O-methyluridine-3'-phosphate
  modified_base 10: mod_base = OTHER; note = 2'-O-methylcytidine-3'-phosphate
  modified_base 11: mod_base = OTHER; note = 2'-O-methyladenosine-3'-phosphate
  modified_base 13: mod_base = OTHER; note = 2'-O-methylcytidine-3'-phosphate
  modified_base 14: mod_base = OTHER; note = 2'-fluorocytidine-3'-phosphate
  modified_base 15: mod_base = OTHER; note = 2'-O-methyladenosine-3'-phosphate
  modified_base 16: mod_base = OTHER; note = 2'-O-methyladenosine-3'-phosphate
  modified_base 17: mod_base = OTHER; note = 2'-O-methylcytidine-3'-phosphate
  modified_base 18: mod_base = OTHER; note = 2'-O-methylcytidine-3'-phosphate
  modified_base 19: mod_base = OTHER; note = 2'-O-methyluridine-3'-phosphate
  modified_base 20: mod_base = OTHER; note = 2'-O-methylguanosine-3'-phosphate
  modified_base 21: mod_base = OTHER; note = 2'-O-methylguanosine-3'-phosphorothioate
  modified_base 22: mod_base = OTHER; note = 2'-O-methyladenosine-3'-phosphorothioate
  modified_base 23: mod_base = OTHER; note = 2'-O-methyladenosine-3'-phosphate
  misc_feature 1: note = RNA
  misc_feature 2: note = DNA
  misc_feature 3..4: note = RNA
  misc_feature 5: note = DNA
  misc_feature 6: note = RNA
  misc_feature 7: note = DNA
  misc_feature 8..11: note = RNA
  misc_feature 12: note = DNA
  misc_feature 13..23: note = RNA
acaacacatcagccaacctggaa

SEQ ID NO: 7674 - DNA, 23 bp, synthetic construct
  source 1..23: mol_type = other DNA
  modified_base 1: mod_base = OTHER; note = 2'-O-methyladenosine-3'-phosphorothioate
  modified_base 2: mod_base = OTHER; note = 2'-deoxycytidine-3'-phosphorothioate
  modified_base 3: mod_base = OTHER; note = 2'-O-methylcytidine-3'-phosphate
  modified_base 4: mod_base = OTHER; note = 2'-O-methyladenosine-3'-phosphate
  modified_base 6: mod_base = OTHER; note = 2'-O-methylcytidine-3'-phosphate
  modified_base 8: mod_base = OTHER; note = 2'-O-methylcytidine-3'-phosphate
  modified_base 9: mod_base = OTHER; note = 2'-O-methyladenosine-3'-phosphate
  modified_base 10: mod_base = OTHER; note = 2'-O-methyluridine-3'-phosphate
  modified_base 11: mod_base = OTHER; note = 2'-O-methylcytidine-3'-phosphate
  modified_base 13: mod_base = OTHER; note = 2'-O-methylguanosine-3'-phosphate
  modified_base 14: mod_base = OTHER; note = 2'-fluorocytidine-3'-phosphate
  modified_base 15: mod_base = OTHER; note = 2'-O-methylcytidine-3'-phosphate
  modified_base 16: mod_base = OTHER; note = 2'-O-methyladenosine-3'-phosphate
  modified_base 17: mod_base = OTHER; note = 2'-O-methyladenosine-3'-phosphate
  modified_base 18: mod_base = OTHER; note = 2'-O-methylcytidine-3'-phosphate
  modified_base 19: mod_base = OTHER; note = 2'-O-methylcytidine-3'-phosphate
  modified_base 20: mod_base = OTHER; note = 2'-O-methyluridine-3'-phosphate
  modified_base 21: mod_base = OTHER; note = 2'-O-methylguanosine-3'-phosphorothioate
  modified_base 22: mod_base = OTHER; note = 2'-O-methylguanosine-3'-phosphorothioate
  modified_base 23: mod_base = OTHER; note = 2'-O-methyladenosine-3'-phosphate
  misc_feature 1: note = RNA
  misc_feature 2: note = DNA
  misc_feature 3..4: note = RNA
  misc_feature 5: note = DNA
  misc_feature 6: note = RNA
  misc_feature 7: note = DNA
  misc_feature 8..11: note = RNA
  misc_feature 12: note = DNA
  misc_feature 13..23: note = RNA
accaacacatcagccaacctgga

SEQ ID NO: 7675 - DNA, 23 bp, synthetic construct
  source 1..23: mol_type = other DNA
  modified_base 1: mod_base = OTHER; note = 2'-O-methyladenosine-3'-phosphorothioate
  modified_base 2: mod_base = OTHER; note = 2'-deoxyadenosine-3'-phosphorothioate
  modified_base 3: mod_base = OTHER; note = 2'-O-methylguanosine-3'-phosphate
  modified_base 4: mod_base = OTHER; note = 2'-O-methylguanosine-3'-phosphate
  modified_base 6: mod_base = OTHER; note = 2'-O-methylcytidine-3'-phosphate
  modified_base 8: mod_base = OTHER; note = 2'-O-methyluridine-3'-phosphate
  modified_base 9: mod_base = OTHER; note = 2'-O-methyladenosine-3'-phosphate
  modified_base 10: mod_base = OTHER; note = 2'-O-methylguanosine-3'-phosphate
  modified_base 11: mod_base = OTHER; note = 2'-O-methylguanosine-3'-phosphate
  modified_base 13: mod_base = OTHER; note = 2'-O-methylcytidine-3'-phosphate
  modified_base 14: mod_base = OTHER; note = 2'-fluoroadenosine-3'-phosphate
  modified_base 15: mod_base = OTHER; note = 2'-O-methylguanosine-3'-phosphate
  modified_base 16: mod_base = OTHER; note = 2'-O-methylguanosine-3'-phosphate
  modified_base 17: mod_base = OTHER; note = 2'-O-methyladenosine-3'-phosphate
  modified_base 18: mod_base = OTHER; note = 2'-O-methyladenosine-3'-phosphate
  modified_base 19: mod_base = OTHER; note = 2'-O-methyladenosine-3'-phosphate
  modified_base 20: mod_base = OTHER; note = 2'-O-methyluridine-3'-phosphate
  modified_base 21: mod_base = OTHER; note = 2'-O-methylcytidine-3'-phosphorothioate
  modified_base 22: mod_base = OTHER; note = 2'-O-methyladenosine-3'-phosphorothioate
  modified_base 23: mod_base = OTHER; note = 2'-O-methyluridine-3'-phosphate
  misc_feature 1: note = RNA
  misc_feature 2: note = DNA
  misc_feature 3..4: note = RNA
  misc_feature 5: note = DNA
  misc_feature 6: note = RNA
  misc_feature 7: note = DNA
  misc_feature 8..11: note = RNA
  misc_feature 12: note = DNA
  misc_feature 13..23: note = RNA
aaggacttagggcaggaaatcat

SEQ ID NO: 7676 - DNA, 23 bp, synthetic construct
  source 1..23: mol_type = other DNA
  modified_base 1: mod_base = OTHER; note = 2'-O-methyladenosine-3'-phosphorothioate
  modified_base 2: mod_base = OTHER; note = 2'-deoxyadenosine-3'-phosphorothioate
  modified_base 3: mod_base = OTHER; note = 2'-O-methylcytidine-3'-phosphate
  modified_base 4: mod_base = OTHER; note = 2'-O-methyladenosine-3'-phosphate
  modified_base 6: mod_base = OTHER; note = 2'-O-methylguanosine-3'-phosphate
  modified_base 8: mod_base = OTHER; note = 2'-O-methylcytidine-3'-phosphate
  modified_base 9: mod_base = OTHER; note = 2'-O-methyluridine-3'-phosphate
  modified_base 10: mod_base = OTHER; note = 2'-O-methyluridine-3'-phosphate
  modified_base 11: mod_base = OTHER; note = 2'-O-methyladenosine-3'-phosphate
  modified_base 13: mod_base = OTHER; note = 2'-O-methylguanosine-3'-phosphate
  modified_base 14: mod_base = OTHER; note = 2'-fluoroguanosine-3'-phosphate
  modified_base 15: mod_base = OTHER; note = 2'-O-methylcytidine-3'-phosphate
  modified_base 16: mod_base = OTHER; note = 2'-O-methyladenosine-3'-phosphate
  modified_base 17: mod_base = OTHER; note = 2'-O-methylguanosine-3'-phosphate
  modified_base 18: mod_base = OTHER; note = 2'-O-methylguanosine-3'-phosphate
  modified_base 19: mod_base = OTHER; note = 2'-O-methyladenosine-3'-phosphate
  modified_base 20: mod_base = OTHER; note = 2'-O-methyladenosine-3'-phosphate
  modified_base 21: mod_base = OTHER; note = 2'-O-methyladenosine-3'-phosphorothioate
  modified_base 22: mod_base = OTHER; note = 2'-O-methyluridine-3'-phosphorothioate
  modified_base 23: mod_base = OTHER; note = 2'-O-methylcytidine-3'-phosphate
  misc_feature 1: note = RNA
  misc_feature 2: note = DNA
  misc_feature 3..4: note = RNA
  misc_feature 5: note = DNA
  misc_feature 6: note = RNA
  misc_feature 7: note = DNA
  misc_feature 8..11: note = RNA
  misc_feature 12: note = DNA
  misc_feature 13..23: note = RNA
aacaggacttagggcaggaaatc

SEQ ID NO: 7677 - DNA, 23 bp, synthetic construct
  source 1..23: mol_type = other DNA
  modified_base 1: mod_base = OTHER; note = 2'-O-methyladenosine-3'-phosphorothioate
  modified_base 2: mod_base = OTHER; note = 2'-deoxycytidine-3'-phosphorothioate
  modified_base 3: mod_base = OTHER; note = 2'-O-methylcytidine-3'-phosphate
  modified_base 4: mod_base = OTHER; note = 2'-O-methyluridine-3'-phosphate
  modified_base 6: mod_base = OTHER; note = 2'-O-methylguanosine-3'-phosphate
  modified_base 8: mod_base = OTHER; note = 2'-O-methylcytidine-3'-phosphate
  modified_base 9: mod_base = OTHER; note = 2'-O-methylcytidine-3'-phosphate
  modified_base 10: mod_base = OTHER; note = 2'-O-methylcytidine-3'-phosphate
  modified_base 11: mod_base = OTHER; note = 2'-O-methyluridine-3'-phosphate
  modified_base 13: mod_base = OTHER; note = 2'-O-methyladenosine-3'-phosphate
  modified_base 14: mod_base = OTHER; note = 2'-fluorocytidine-3'-phosphate
  modified_base 15: mod_base = OTHER; note = 2'-O-methyladenosine-3'-phosphate
  modified_base 16: mod_base = OTHER; note = 2'-O-methyluridine-3'-phosphate
  modified_base 17: mod_base = OTHER; note = 2'-O-methylcytidine-3'-phosphate
  modified_base 18: mod_base = OTHER; note = 2'-O-methyluridine-3'-phosphate
  modified_base 19: mod_base = OTHER; note = 2'-O-methyluridine-3'-phosphate
  modified_base 20: mod_base = OTHER; note = 2'-O-methylcytidine-3'-phosphate
  modified_base 21: mod_base = OTHER; note = 2'-O-methyluridine-3'-phosphorothioate
  modified_base 22: mod_base = OTHER; note = 2'-O-methylcytidine-3'-phosphorothioate
  modified_base 23: mod_base = OTHER; note = 2'-O-methyladenosine-3'-phosphate
  misc_feature 1: note = RNA
  misc_feature 2: note = DNA
  misc_feature 3..4: note = RNA
  misc_feature 5: note = DNA
  misc_feature 6: note = RNA
  misc_feature 7: note = DNA
  misc_feature 8..11: note = RNA
  misc_feature 12: note = DNA
  misc_feature 13..23: note = RNA
acctagtccctgacatcttctca

SEQ ID NO: 7678 - DNA, 23 bp, synthetic construct
  source 1..23: mol_type = other DNA
  modified_base 1: mod_base = OTHER; note = 2'-O-methyladenosine-3'-phosphorothioate
  modified_base 2: mod_base = OTHER; note = 2'-deoxycytidine-3'-phosphorothioate
  modified_base 3: mod_base = OTHER; note = 2'-O-methylcytidine-3'-phosphate
  modified_base 4: mod_base = OTHER; note = 2'-O-methylcytidine-3'-phosphate
  modified_base 6: mod_base = OTHER; note = 2'-O-methyladenosine-3'-phosphate
  modified_base 8: mod_base = OTHER; note = 2'-O-methyluridine-3'-phosphate
  modified_base 9: mod_base = OTHER; note = 2'-O-methylcytidine-3'-phosphate
  modified_base 10: mod_base = OTHER; note = 2'-O-methylcytidine-3'-phosphate
  modified_base 11: mod_base = OTHER; note = 2'-O-methylcytidine-3'-phosphate
  modified_base 13: mod_base = OTHER; note = 2'-O-methylguanosine-3'-phosphate
  modified_base 14: mod_base = OTHER; note = 2'-fluoroadenosine-3'-phosphate
  modified_base 15: mod_base = OTHER; note = 2'-O-methylcytidine-3'-phosphate
  modified_base 16: mod_base = OTHER; note = 2'-O-methyladenosine-3'-phosphate
  modified_base 17: mod_base = OTHER; note = 2'-O-methyluridine-3'-phosphate
  modified_base 18: mod_base = OTHER; note = 2'-O-methylcytidine-3'-phosphate
  modified_base 19: mod_base = OTHER; note = 2'-O-methyluridine-3'-phosphate
  modified_base 20: mod_base = OTHER; note = 2'-O-methyluridine-3'-phosphate
  modified_base 21: mod_base = OTHER; note = 2'-O-methylcytidine-3'-phosphorothioate
  modified_base 22: mod_base = OTHER; note = 2'-O-methyluridine-3'-phosphorothioate
  modified_base 23: mod_base = OTHER; note = 2'-O-methylcytidine-3'-phosphate
  misc_feature 1: note = RNA
  misc_feature 2: note = DNA
  misc_feature 3..4: note = RNA
  misc_feature 5: note = DNA
  misc_feature 6: note = RNA
  misc_feature 7: note = DNA
  misc_feature 8..11: note = RNA
  misc_feature 12: note = DNA
  misc_feature 13..23: note = RNA
accctagtccctgacatcttctc

SEQ ID NO: 7679 - DNA, 23 bp, synthetic construct
  source 1..23: mol_type = other DNA
  modified_base 1: mod_base = OTHER; note = 2'-O-methyladenosine-3'-phosphorothioate
  modified_base 2: mod_base = OTHER; note = 2'-deoxythimidine-3'-phosphorothioate
  modified_base 3: mod_base = OTHER; note = 2'-O-methylcytidine-3'-phosphate
  modified_base 4: mod_base = OTHER; note = 2'-O-methylcytidine-3'-phosphate
  modified_base 6: mod_base = OTHER; note = 2'-O-methyluridine-3'-phosphate
  modified_base 8: mod_base = OTHER; note = 2'-O-methylguanosine-3'-phosphate
  modified_base 9: mod_base = OTHER; note = 2'-O-methyluridine-3'-phosphate
  modified_base 10: mod_base = OTHER; note = 2'-O-methylcytidine-3'-phosphate
  modified_base 11: mod_base = OTHER; note = 2'-O-methylcytidine-3'-phosphate
  modified_base 13: mod_base = OTHER; note = 2'-O-methyluridine-3'-phosphate
  modified_base 14: mod_base = OTHER; note = 2'-fluoroguanosine-3'-phosphate
  modified_base 15: mod_base = OTHER; note = 2'-O-methyladenosine-3'-phosphate
  modified_base 16: mod_base = OTHER; note = 2'-O-methylcytidine-3'-phosphate
  modified_base 17: mod_base = OTHER; note = 2'-O-methyladenosine-3'-phosphate
  modified_base 18: mod_base = OTHER; note = 2'-O-methyluridine-3'-phosphate
  modified_base 19: mod_base = OTHER; note = 2'-O-methylcytidine-3'-phosphate
  modified_base 20: mod_base = OTHER; note = 2'-O-methyluridine-3'-phosphate
  modified_base 21: mod_base = OTHER; note = 2'-O-methyluridine-3'-phosphorothioate
  modified_base 22: mod_base = OTHER; note = 2'-O-methylcytidine-3'-phosphorothioate
  modified_base 23: mod_base = OTHER; note = 2'-O-methyluridine-3'-phosphate
  misc_feature 1: note = RNA
  misc_feature 2: note = DNA
  misc_feature 3..4: note = RNA
  misc_feature 5: note = DNA
  misc_feature 6: note = RNA
  misc_feature 7: note = DNA
  misc_feature 8..11: note = RNA
  misc_feature 12: note = DNA
  misc_feature 13..23: note = RNA
atccctagtccctgacatcttct

SEQ ID NO: 7680 - DNA, 23 bp, synthetic construct
  source 1..23: mol_type = other DNA
  modified_base 1: mod_base = OTHER; note = 2'-O-methyladenosine-3'-phosphorothioate
  modified_base 2: mod_base = OTHER; note = 2'-deoxycytidine-3'-phosphorothioate
  modified_base 3: mod_base = OTHER; note = 2'-O-methyluridine-3'-phosphate
  modified_base 4: mod_base = OTHER; note = 2'-O-methylcytidine-3'-phosphate
  modified_base 6: mod_base = OTHER; note = 2'-O-methylcytidine-3'-phosphate
  modified_base 8: mod_base = OTHER; note = 2'-O-methyladenosine-3'-phosphate
  modified_base 9: mod_base = OTHER; note = 2'-O-methylguanosine-3'-phosphate
  modified_base 10: mod_base = OTHER; note = 2'-O-methyluridine-3'-phosphate
  modified_base 11: mod_base = OTHER; note = 2'-O-methylcytidine-3'-phosphate
  modified_base 13: mod_base = OTHER; note = 2'-O-methylcytidine-3'-phosphate
  modified_base 14: mod_base = OTHER; note = 2'-fluorouridine-3'-phosphate
  modified_base 15: mod_base = OTHER; note = 2'-O-methylguanosine-3'-phosphate
  modified_base 16: mod_base = OTHER; note = 2'-O-methyladenosine-3'-phosphate
  modified_base 17: mod_base = OTHER; note = 2'-O-methylcytidine-3'-phosphate
  modified_base 18: mod_base = OTHER; note = 2'-O-methyladenosine-3'-phosphate
  modified_base 19: mod_base = OTHER; note = 2'-O-methyluridine-3'-phosphate
  modified_base 20: mod_base = OTHER; note = 2'-O-methylcytidine-3'-phosphate
  modified_base 21: mod_base = OTHER; note = 2'-O-methyluridine-3'-phosphorothioate
  modified_base 22: mod_base = OTHER; note = 2'-O-methyluridine-3'-phosphorothioate
  modified_base 23: mod_base = OTHER; note = 2'-O-methylcytidine-3'-phosphate
  misc_feature 1: note = RNA
  misc_feature 2: note = DNA
  misc_feature 3..4: note = RNA
  misc_feature 5: note = DNA
  misc_feature 6: note = RNA
  misc_feature 7: note = DNA
  misc_feature 8..11: note = RNA
  misc_feature 12: note = DNA
  misc_feature 13..23: note = RNA
actccctagtccctgacatcttc

SEQ ID NO: 7681 - DNA, 23 bp, synthetic construct
  source 1..23: mol_type = other DNA
  modified_base 1: mod_base = OTHER; note = 2'-O-methyladenosine-3'-phosphorothioate
  modified_base 2: mod_base = OTHER; note = 2'-deoxycytidine-3'-phosphorothioate
  modified_base 3: mod_base = OTHER; note = 2'-O-methylcytidine-3'-phosphate
  modified_base 4: mod_base = OTHER; note = 2'-O-methyluridine-3'-phosphate
  modified_base 6: mod_base = OTHER; note = 2'-O-methylcytidine-3'-phosphate
  modified_base 8: mod_base = OTHER; note = 2'-O-methyluridine-3'-phosphate
  modified_base 9: mod_base = OTHER; note = 2'-O-methyladenosine-3'-phosphate
  modified_base 10: mod_base = OTHER; note = 2'-O-methylguanosine-3'-phosphate
  modified_base 11: mod_base = OTHER; note = 2'-O-methyluridine-3'-phosphate
  modified_base 13: mod_base = OTHER; note = 2'-O-methylcytidine-3'-phosphate
  modified_base 14: mod_base = OTHER; note = 2'-fluorocytidine-3'-phosphate
  modified_base 15: mod_base = OTHER; note = 2'-O-methyluridine-3'-phosphate
  modified_base 16: mod_base = OTHER; note = 2'-O-methylguanosine-3'-phosphate
  modified_base 17: mod_base = OTHER; note = 2'-O-methyladenosine-3'-phosphate
  modified_base 18: mod_base = OTHER; note = 2'-O-methylcytidine-3'-phosphate
  modified_base 19: mod_base = OTHER; note = 2'-O-methyladenosine-3'-phosphate
  modified_base 20: mod_base = OTHER; note = 2'-O-methyluridine-3'-phosphate
  modified_base 21: mod_base = OTHER; note = 2'-O-methylcytidine-3'-phosphorothioate
  modified_base 22: mod_base = OTHER; note = 2'-O-methyluridine-3'-phosphorothioate
  modified_base 23: mod_base = OTHER; note = 2'-O-methyluridine-3'-phosphate
  misc_feature 1: note = RNA
  misc_feature 2: note = DNA
  misc_feature 3..4: note = RNA
  misc_feature 5: note = DNA
  misc_feature 6: note = RNA
  misc_feature 7: note = DNA
  misc_feature 8..11: note = RNA
  misc_feature 12: note = DNA
  misc_feature 13..23: note = RNA
acctccctagtccctgacatctt

SEQ ID NO: 7682 - DNA, 23 bp, synthetic construct
  source 1..23: mol_type = other DNA
  modified_base 1: mod_base = OTHER; note = 2'-O-methyladenosine-3'-phosphorothioate
  modified_base 2: mod_base = OTHER; note = 2'-deoxycytidine-3'-phosphorothioate
  modified_base 3: mod_base = OTHER; note = 2'-O-methylcytidine-3'-phosphate
  modified_base 4: mod_base = OTHER; note = 2'-O-methylcytidine-3'-phosphate
  modified_base 6: mod_base = OTHER; note = 2'-O-methylcytidine-3'-phosphate
  modified_base 8: mod_base = OTHER; note = 2'-O-methylcytidine-3'-phosphate
  modified_base 9: mod_base = OTHER; note = 2'-O-methyluridine-3'-phosphate
  modified_base 10: mod_base = OTHER; note = 2'-O-methyladenosine-3'-phosphate
  modified_base 11: mod_base = OTHER; note = 2'-O-methylguanosine-3'-phosphate
  modified_base 13: mod_base = OTHER; note = 2'-O-methylcytidine-3'-phosphate
  modified_base 14: mod_base = OTHER; note = 2'-fluorocytidine-3'-phosphate
  modified_base 15: mod_base = OTHER; note = 2'-O-methylcytidine-3'-phosphate
  modified_base 16: mod_base = OTHER; note = 2'-O-methyluridine-3'-phosphate
  modified_base 17: mod_base = OTHER; note = 2'-O-methylguanosine-3'-phosphate
  modified_base 18: mod_base = OTHER; note = 2'-O-methyladenosine-3'-phosphate
  modified_base 19: mod_base = OTHER; note = 2'-O-methylcytidine-3'-phosphate
  modified_base 20: mod_base = OTHER; note = 2'-O-methyladenosine-3'-phosphate
  modified_base 21: mod_base = OTHER; note = 2'-O-methyluridine-3'-phosphorothioate
  modified_base 22: mod_base = OTHER; note = 2'-O-methylcytidine-3'-phosphorothioate
  modified_base 23: mod_base = OTHER; note = 2'-O-methyluridine-3'-phosphate
  misc_feature 1: note = RNA
  misc_feature 2: note = DNA
  misc_feature 3..4: note = RNA
  misc_feature 5: note = DNA
  misc_feature 6: note = RNA
  misc_feature 7: note = DNA
  misc_feature 8..11: note = RNA
  misc_feature 12: note = DNA
  misc_feature 13..23: note = RNA
accctccctagtccctgacatct

SEQ ID NO: 7683 - DNA, 23 bp, synthetic construct
  source 1..23: mol_type = other DNA
  modified_base 1: mod_base = OTHER; note = 2'-O-methyladenosine-3'-phosphorothioate
  modified_base 2: mod_base = OTHER; note = 2'-deoxycytidine-3'-phosphorothioate
  modified_base 3: mod_base = OTHER; note = 2'-O-methyladenosine-3'-phosphate
  modified_base 4: mod_base = OTHER; note = 2'-O-methyluridine-3'-phosphate
  modified_base 6: mod_base = OTHER; note = 2'-O-methyluridine-3'-phosphate
  modified_base 8: mod_base = OTHER; note = 2'-O-methyluridine-3'-phosphate
  modified_base 9: mod_base = OTHER; note = 2'-O-methylcytidine-3'-phosphate
  modified_base 10: mod_base = OTHER; note = 2'-O-methyluridine-3'-phosphate
  modified_base 11: mod_base = OTHER; note = 2'-O-methylguanosine-3'-phosphate
  modified_base 13: mod_base = OTHER; note = 2'-O-methyluridine-3'-phosphate
  modified_base 14: mod_base = OTHER; note = 2'-fluorouridine-3'-phosphate
  modified_base 15: mod_base = OTHER; note = 2'-O-methylcytidine-3'-phosphate
  modified_base 16: mod_base = OTHER; note = 2'-O-methylcytidine-3'-phosphate
  modified_base 17: mod_base = OTHER; note = 2'-O-methyluridine-3'-phosphate
  modified_base 18: mod_base = OTHER; note = 2'-O-methylcytidine-3'-phosphate
  modified_base 19: mod_base = OTHER; note = 2'-O-methylcytidine-3'-phosphate
  modified_base 20: mod_base = OTHER; note = 2'-O-methyluridine-3'-phosphate
  modified_base 21: mod_base = OTHER; note = 2'-O-methylcytidine-3'-phosphorothioate
  modified_base 22: mod_base = OTHER; note = 2'-O-methylcytidine-3'-phosphorothioate
  modified_base 23: mod_base = OTHER; note = 2'-O-methylcytidine-3'-phosphate
  misc_feature 1: note = RNA
  misc_feature 2: note = DNA
  misc_feature 3..4: note = RNA
  misc_feature 5: note = DNA
  misc_feature 6: note = RNA
  misc_feature 7: note = DNA
  misc_feature 8..11: note = RNA
  misc_feature 12: note = DNA
  misc_feature 13..23: note = RNA
acatctatctgcttcctcctccc

SEQ ID NO: 7684 - DNA, 23 bp, synthetic construct
  source 1..23: mol_type = other DNA
  modified_base 1: mod_base = OTHER; note = 2'-O-methyladenosine-3'-phosphorothioate
  modified_base 2: mod_base = OTHER; note = 2'-deoxycytidine-3'-phosphorothioate
  modified_base 3: mod_base = OTHER; note = 2'-O-methylcytidine-3'-phosphate
  modified_base 4: mod_base = OTHER; note = 2'-O-methyladenosine-3'-phosphate
  modified_base 6: mod_base = OTHER; note = 2'-O-methylcytidine-3'-phosphate
  modified_base 8: mod_base = OTHER; note = 2'-O-methyladenosine-3'-phosphate
  modified_base 9: mod_base = OTHER; note = 2'-O-methyluridine-3'-phosphate
  modified_base 10: mod_base = OTHER; note = 2'-O-methylcytidine-3'-phosphate
  modified_base 11: mod_base = OTHER; note = 2'-O-methyluridine-3'-phosphate
  modified_base 13: mod_base = OTHER; note = 2'-O-methylcytidine-3'-phosphate
  modified_base 14: mod_base = OTHER; note = 2'-fluorouridine-3'-phosphate
  modified_base 15: mod_base = OTHER; note = 2'-O-methyluridine-3'-phosphate
  modified_base 16: mod_base = OTHER; note = 2'-O-methylcytidine-3'-phosphate
  modified_base 17: mod_base = OTHER; note = 2'-O-methylcytidine-3'-phosphate
  modified_base 18: mod_base = OTHER; note = 2'-O-methyluridine-3'-phosphate
  modified_base 19: mod_base = OTHER; note = 2'-O-methylcytidine-3'-phosphate
  modified_base 20: mod_base = OTHER; note = 2'-O-methylcytidine-3'-phosphate
  modified_base 21: mod_base = OTHER; note = 2'-O-methyluridine-3'-phosphorothioate
  modified_base 22: mod_base = OTHER; note = 2'-O-methylcytidine-3'-phosphorothioate
  modified_base 23: mod_base = OTHER; note = 2'-O-methylcytidine-3'-phosphate
  misc_feature 1: note = RNA
  misc_feature 2: note = DNA
  misc_feature 3..4: note = RNA
  misc_feature 5: note = DNA
  misc_feature 6: note = RNA
  misc_feature 7: note = DNA
  misc_feature 8..11: note = RNA
  misc_feature 12: note = DNA
  misc_feature 13..23: note = RNA
accatctatctgcttcctcctcc

SEQ ID NO: 7685 - DNA, 23 bp, synthetic construct
  source 1..23: mol_type = other DNA
  modified_base 1: mod_base = OTHER; note = 2'-O-methyladenosine-3'-phosphorothioate
  modified_base 2: mod_base = OTHER; note = 2'-deoxyadenosine-3'-phosphorothioate
  modified_base 3: mod_base = OTHER; note = 2'-O-methylcytidine-3'-phosphate
  modified_base 4: mod_base = OTHER; note = 2'-O-methylcytidine-3'-phosphate
  modified_base 6: mod_base = OTHER; note = 2'-O-methyluridine-3'-phosphate
  modified_base 8: mod_base = OTHER; note = 2'-O-methyluridine-3'-phosphate
  modified_base 9: mod_base = OTHER; note = 2'-O-methyladenosine-3'-phosphate
  modified_base 10: mod_base = OTHER; note = 2'-O-methyluridine-3'-phosphate
  modified_base 11: mod_base = OTHER; note = 2'-O-methylcytidine-3'-phosphate
  modified_base 13: mod_base = OTHER; note = 2'-O-methylguanosine-3'-phosphate
  modified_base 14: mod_base = OTHER; note = 2'-fluorocytidine-3'-phosphate
  modified_base 15: mod_base = OTHER; note = 2'-O-methyluridine-3'-phosphate
  modified_base 16: mod_base = OTHER; note = 2'-O-methyluridine-3'-phosphate
  modified_base 17: mod_base = OTHER; note = 2'-O-methylcytidine-3'-phosphate
  modified_base 18: mod_base = OTHER; note = 2'-O-methylcytidine-3'-phosphate
  modified_base 19: mod_base = OTHER; note = 2'-O-methyluridine-3'-phosphate
  modified_base 20: mod_base = OTHER; note = 2'-O-methylcytidine-3'-phosphate
  modified_base 21: mod_base = OTHER; note = 2'-O-methylcytidine-3'-phosphorothioate
  modified_base 22: mod_base = OTHER; note = 2'-O-methyluridine-3'-phosphorothioate
  modified_base 23: mod_base = OTHER; note = 2'-O-methylcytidine-3'-phosphate
  misc_feature 1: note = RNA
  misc_feature 2: note = DNA
  misc_feature 3..4: note = RNA
  misc_feature 5: note = DNA
  misc_feature 6: note = RNA
  misc_feature 7: note = DNA
  misc_feature 8..11: note = RNA
  misc_feature 12: note = DNA
  misc_feature 13..23: note = RNA
aaccatctatctgcttcctcctc

SEQ ID NO: 7686 - DNA, 23 bp, synthetic construct
  source 1..23: mol_type = other DNA
  modified_base 1: mod_base = OTHER; note = 2'-O-methyladenosine-3'-phosphorothioate
  modified_base 2: mod_base = OTHER; note = 2'-deoxyguanosine-3'-phosphorothioate
  modified_base 3: mod_base = OTHER; note = 2'-O-methyladenosine-3'-phosphate
  modified_base 4: mod_base = OTHER; note = 2'-O-methylcytidine-3'-phosphate
  modified_base 6: mod_base = OTHER; note = 2'-O-methyladenosine-3'-phosphate
  modified_base 8: mod_base = OTHER; note = 2'-O-methylcytidine-3'-phosphate
  modified_base 9: mod_base = OTHER; note = 2'-O-methyluridine-3'-phosphate
  modified_base 10: mod_base = OTHER; note = 2'-O-methyladenosine-3'-phosphate
  modified_base 11: mod_base = OTHER; note = 2'-O-methyluridine-3'-phosphate
  modified_base 13: mod_base = OTHER; note = 2'-O-methyluridine-3'-phosphate
  modified_base 14: mod_base = OTHER; note = 2'-fluoroguanosine-3'-phosphate
  modified_base 15: mod_base = OTHER; note = 2'-O-methylcytidine-3'-phosphate
  modified_base 16: mod_base = OTHER; note = 2'-O-methyluridine-3'-phosphate
  modified_base 17: mod_base = OTHER; note = 2'-O-methyluridine-3'-phosphate
  modified_base 18: mod_base = OTHER; note = 2'-O-methylcytidine-3'-phosphate
  modified_base 19: mod_base = OTHER; note = 2'-O-methylcytidine-3'-phosphate
  modified_base 20: mod_base = OTHER; note = 2'-O-methyluridine-3'-phosphate
  modified_base 21: mod_base = OTHER; note = 2'-O-methylcytidine-3'-phosphorothioate
  modified_base 22: mod_base = OTHER; note = 2'-O-methylcytidine-3'-phosphorothioate
  modified_base 23: mod_base = OTHER; note = 2'-O-methyluridine-3'-phosphate
  misc_feature 1: note = RNA
  misc_feature 2: note = DNA
  misc_feature 3..4: note = RNA
  misc_feature 5: note = DNA
  misc_feature 6: note = RNA
  misc_feature 7: note = DNA
  misc_feature 8..11: note = RNA
  misc_feature 12: note = DNA
  misc_feature 13..23: note = RNA
agaccatctatctgcttcctcct

SEQ ID NO: 7687 - DNA, 23 bp, synthetic construct
  source 1..23: mol_type = other DNA
  modified_base 1: mod_base = OTHER; note = 2'-O-methyladenosine-3'-phosphorothioate
  modified_base 2: mod_base = OTHER; note = 2'-deoxyguanosine-3'-phosphorothioate
  modified_base 3: mod_base = OTHER; note = 2'-O-methylguanosine-3'-phosphate
  modified_base 4: mod_base = OTHER; note = 2'-O-methyladenosine-3'-phosphate
  modified_base 6: mod_base = OTHER; note = 2'-O-methylcytidine-3'-phosphate
  modified_base 8: mod_base = OTHER; note = 2'-O-methyluridine-3'-phosphate
  modified_base 9: mod_base = OTHER; note = 2'-O-methylcytidine-3'-phosphate
  modified_base 10: mod_base = OTHER; note = 2'-O-methyluridine-3'-phosphate
  modified_base 11: mod_base = OTHER; note = 2'-O-methyladenosine-3'-phosphate
  modified_base 13: mod_base = OTHER; note = 2'-O-methylcytidine-3'-phosphate
  modified_base 14: mod_base = OTHER; note = 2'-fluorouridine-3'-phosphate
  modified_base 15: mod_base = OTHER; note = 2'-O-methylguanosine-3'-phosphate
  modified_base 16: mod_base = OTHER; note = 2'-O-methylcytidine-3'-phosphate
  modified_base 17: mod_base = OTHER; note = 2'-O-methyluridine-3'-phosphate
  modified_base 18: mod_base = OTHER; note = 2'-O-methyluridine-3'-phosphate
  modified_base 19: mod_base = OTHER; note = 2'-O-methylcytidine-3'-phosphate
  modified_base 20: mod_base = OTHER; note = 2'-O-methylcytidine-3'-phosphate
  modified_base 21: mod_base = OTHER; note = 2'-O-methyluridine-3'-phosphorothioate
  modified_base 22: mod_base = OTHER; note = 2'-O-methylcytidine-3'-phosphorothioate
  modified_base 23: mod_base = OTHER; note = 2'-O-methylcytidine-3'-phosphate
  misc_feature 1: note = RNA
  misc_feature 2: note = DNA
  misc_feature 3..4: note = RNA
  misc_feature 5: note = DNA
  misc_feature 6: note = RNA
  misc_feature 7: note = DNA
  misc_feature 8..11: note = RNA
  misc_feature 12: note = DNA
  misc_feature 13..23: note = RNA
aggaccatctatctgcttcctcc

SEQ ID NO: 7688 - DNA, 23 bp, synthetic construct
  source 1..23: mol_type = other DNA
  modified_base 1: mod_base = OTHER; note = 2'-O-methyladenosine-3'-phosphorothioate
  modified_base 2: mod_base = OTHER; note = 2'-deoxythimidine-3'-phosphorothioate
  modified_base 3: mod_base = OTHER; note = 2'-O-methylguanosine-3'-phosphate
  modified_base 4: mod_base = OTHER; note = 2'-O-methylguanosine-3'-phosphate
  modified_base 6: mod_base = OTHER; note = 2'-O-methylcytidine-3'-phosphate
  modified_base 8: mod_base = OTHER; note = 2'-O-methyladenosine-3'-phosphate
  modified_base 9: mod_base = OTHER; note = 2'-O-methyluridine-3'-phosphate
  modified_base 10: mod_base = OTHER; note = 2'-O-methylcytidine-3'-phosphate
  modified_base 11: mod_base = OTHER; note = 2'-O-methyluridine-3'-phosphate
  modified_base 13: mod_base = OTHER; note = 2'-O-methyluridine-3'-phosphate
  modified_base 14: mod_base = OTHER; note = 2'-fluorocytidine-3'-phosphate
  modified_base 15: mod_base = OTHER; note = 2'-O-methyluridine-3'-phosphate
  modified_base 16: mod_base = OTHER; note = 2'-O-methylguanosine-3'-phosphate
  modified_base 17: mod_base = OTHER; note = 2'-O-methylcytidine-3'-phosphate
  modified_base 18: mod_base = OTHER; note = 2'-O-methyluridine-3'-phosphate
  modified_base 19: mod_base = OTHER; note = 2'-O-methyluridine-3'-phosphate
  modified_base 20: mod_base = OTHER; note = 2'-O-methylcytidine-3'-phosphate
  modified_base 21: mod_base = OTHER; note = 2'-O-methylcytidine-3'-phosphorothioate
  modified_base 22: mod_base = OTHER; note = 2'-O-methyluridine-3'-phosphorothioate
  modified_base 23: mod_base = OTHER; note = 2'-O-methylcytidine-3'-phosphate
  misc_feature 1: note = RNA
  misc_feature 2: note = DNA
  misc_feature 3..4: note = RNA
  misc_feature 5: note = DNA
  misc_feature 6: note = RNA
  misc_feature 7: note = DNA
  misc_feature 8..11: note = RNA
  misc_feature 12: note = DNA
  misc_feature 13..23: note = RNA
atggaccatctatctgcttcctc

SEQ ID NO: 7689 - DNA, 23 bp, synthetic construct
  source 1..23: mol_type = other DNA
  modified_base 1: mod_base = OTHER; note = 2'-O-methyladenosine-3'-phosphorothioate
  modified_base 2: mod_base = OTHER; note = 2'-deoxycytidine-3'-phosphorothioate
  modified_base 3: mod_base = OTHER; note = 2'-O-methyluridine-3'-phosphate
  modified_base 4: mod_base = OTHER; note = 2'-O-methylguanosine-3'-phosphate
  modified_base 6: mod_base = OTHER; note = 2'-O-methyladenosine-3'-phosphate
  modified_base 8: mod_base = OTHER; note = 2'-O-methylcytidine-3'-phosphate
  modified_base 9: mod_base = OTHER; note = 2'-O-methyladenosine-3'-phosphate
  modified_base 10: mod_base = OTHER; note = 2'-O-methyluridine-3'-phosphate
  modified_base 11: mod_base = OTHER; note = 2'-O-methylcytidine-3'-phosphate
  modified_base 13: mod_base = OTHER; note = 2'-O-methyladenosine-3'-phosphate
  modified_base 14: mod_base = OTHER; note = 2'-fluorouridine-3'-phosphate
  modified_base 15: mod_base = OTHER; note = 2'-O-methylcytidine-3'-phosphate
  modified_base 16: mod_base = OTHER; note = 2'-O-methyluridine-3'-phosphate
  modified_base 17: mod_base = OTHER; note = 2'-O-methylguanosine-3'-phosphate
  modified_base 18: mod_base = OTHER; note = 2'-O-methylcytidine-3'-phosphate
  modified_base 19: mod_base = OTHER; note = 2'-O-methyluridine-3'-phosphate
  modified_base 20: mod_base = OTHER; note = 2'-O-methyluridine-3'-phosphate
  modified_base 21: mod_base = OTHER; note = 2'-O-methylcytidine-3'-phosphorothioate
  modified_base 22: mod_base = OTHER; note = 2'-O-methylcytidine-3'-phosphorothioate
  modified_base 23: mod_base = OTHER; note = 2'-O-methyluridine-3'-phosphate
  misc_feature 1: note = RNA
  misc_feature 2: note = DNA
  misc_feature 3..4: note = RNA
  misc_feature 5: note = DNA
  misc_feature 6: note = RNA
  misc_feature 7: note = DNA
  misc_feature 8..11: note = RNA
  misc_feature 12: note = DNA
  misc_feature 13..23: note = RNA
actggaccatctatctgcttcct

SEQ ID NO: 7690 - DNA, 23 bp, synthetic construct
  source 1..23: mol_type = other DNA
  modified_base 1: mod_base = OTHER; note = 2'-O-methyladenosine-3'-phosphorothioate
  modified_base 2: mod_base = OTHER; note = 2'-deoxyguanosine-3'-phosphorothioate
  modified_base 3: mod_base = OTHER; note = 2'-O-methylcytidine-3'-phosphate
  modified_base 4: mod_base = OTHER; note = 2'-O-methyluridine-3'-phosphate
  modified_base 6: mod_base = OTHER; note = 2'-O-methylguanosine-3'-phosphate
  modified_base 8: mod_base = OTHER; note = 2'-O-methylcytidine-3'-phosphate
  modified_base 9: mod_base = OTHER; note = 2'-O-methylcytidine-3'-phosphate
  modified_base 10: mod_base = OTHER; note = 2'-O-methyladenosine-3'-phosphate
  modified_base 11: mod_base = OTHER; note = 2'-O-methyluridine-3'-phosphate
  modified_base 13: mod_base = OTHER; note = 2'-O-methyluridine-3'-phosphate
  modified_base 14: mod_base = OTHER; note = 2'-fluoroadenosine-3'-phosphate
  modified_base 15: mod_base = OTHER; note = 2'-O-methyluridine-3'-phosphate
  modified_base 16: mod_base = OTHER; note = 2'-O-methylcytidine-3'-phosphate
  modified_base 17: mod_base = OTHER; note = 2'-O-methyluridine-3'-phosphate
  modified_base 18: mod_base = OTHER; note = 2'-O-methylguanosine-3'-phosphate
  modified_base 19: mod_base = OTHER; note = 2'-O-methylcytidine-3'-phosphate
  modified_base 20: mod_base = OTHER; note = 2'-O-methyluridine-3'-phosphate
  modified_base 21: mod_base = OTHER; note = 2'-O-methyluridine-3'-phosphorothioate
  modified_base 22: mod_base = OTHER; note = 2'-O-methylcytidine-3'-phosphorothioate
  modified_base 23: mod_base = OTHER; note = 2'-O-methylcytidine-3'-phosphate
  misc_feature 1: note = RNA
  misc_feature 2: note = DNA
  misc_feature 3..4: note = RNA
  misc_feature 5: note = DNA
  misc_feature 6: note = RNA
  misc_feature 7: note = DNA
  misc_feature 8..11: note = RNA
  misc_feature 12: note = DNA
  misc_feature 13..23: note = RNA
agctggaccatctatctgcttcc

SEQ ID NO: 7691 - DNA, 23 bp, synthetic construct
  source 1..23: mol_type = other DNA
  modified_base 1: mod_base = OTHER; note = 2'-O-methyladenosine-3'-phosphorothioate
  modified_base 2: mod_base = OTHER; note = 2'-deoxythimidine-3'-phosphorothioate
  modified_base 3: mod_base = OTHER; note = 2'-O-methylguanosine-3'-phosphate
  modified_base 4: mod_base = OTHER; note = 2'-O-methylcytidine-3'-phosphate
  modified_base 6: mod_base = OTHER; note = 2'-O-methylguanosine-3'-phosphate
  modified_base 8: mod_base = OTHER; note = 2'-O-methyladenosine-3'-phosphate
  modified_base 9: mod_base = OTHER; note = 2'-O-methylcytidine-3'-phosphate
  modified_base 10: mod_base = OTHER; note = 2'-O-methylcytidine-3'-phosphate
  modified_base 11: mod_base = OTHER; note = 2'-O-methyladenosine-3'-phosphate
  modified_base 13: mod_base = OTHER; note = 2'-O-methylcytidine-3'-phosphate
  modified_base 14: mod_base = OTHER; note = 2'-fluorouridine-3'-phosphate
  modified_base 15: mod_base = OTHER; note = 2'-O-methyladenosine-3'-phosphate
  modified_base 16: mod_base = OTHER; note = 2'-O-methyluridine-3'-phosphate
  modified_base 17: mod_base = OTHER; note = 2'-O-methylcytidine-3'-phosphate
  modified_base 18: mod_base = OTHER; note = 2'-O-methyluridine-3'-phosphate
  modified_base 19: mod_base = OTHER; note = 2'-O-methylguanosine-3'-phosphate
  modified_base 20: mod_base = OTHER; note = 2'-O-methylcytidine-3'-phosphate
  modified_base 21: mod_base = OTHER; note = 2'-O-methyluridine-3'-phosphorothioate
  modified_base 22: mod_base = OTHER; note = 2'-O-methyluridine-3'-phosphorothioate
  modified_base 23: mod_base = OTHER; note = 2'-O-methylcytidine-3'-phosphate
  misc_feature 1: note = RNA
  misc_feature 2: note = DNA
  misc_feature 3..4: note = RNA
  misc_feature 5: note = DNA
  misc_feature 6: note = RNA
  misc_feature 7: note = DNA
  misc_feature 8..11: note = RNA
  misc_feature 12: note = DNA
  misc_feature 13..23: note = RNA
atgctggaccatctatctgcttc

SEQ ID NO: 7692 - DNA, 23 bp, synthetic construct
  source 1..23: mol_type = other DNA
  modified_base 1: mod_base = OTHER; note = 2'-O-methyladenosine-3'-phosphorothioate
  modified_base 2: mod_base = OTHER; note = 2'-deoxycytidine-3'-phosphorothioate
  modified_base 3: mod_base = OTHER; note = 2'-O-methyluridine-3'-phosphate
  modified_base 4: mod_base = OTHER; note = 2'-O-methylguanosine-3'-phosphate
  modified_base 6: mod_base = OTHER; note = 2'-O-methyluridine-3'-phosphate
  modified_base 8: mod_base = OTHER; note = 2'-O-methylguanosine-3'-phosphate
  modified_base 9: mod_base = OTHER; note = 2'-O-methyladenosine-3'-phosphate
  modified_base 10: mod_base = OTHER; note = 2'-O-methylcytidine-3'-phosphate
  modified_base 11: mod_base = OTHER; note = 2'-O-methylcytidine-3'-phosphate
  modified_base 13: mod_base = OTHER; note = 2'-O-methyluridine-3'-phosphate
  modified_base 14: mod_base = OTHER; note = 2'-fluorocytidine-3'-phosphate
  modified_base 15: mod_base = OTHER; note = 2'-O-methyluridine-3'-phosphate
  modified_base 16: mod_base = OTHER; note = 2'-O-methyladenosine-3'-phosphate
  modified_base 17: mod_base = OTHER; note = 2'-O-methyluridine-3'-phosphate
  modified_base 18: mod_base = OTHER; note = 2'-O-methylcytidine-3'-phosphate
  modified_base 19: mod_base = OTHER; note = 2'-O-methyluridine-3'-phosphate
  modified_base 20: mod_base = OTHER; note = 2'-O-methylguanosine-3'-phosphate
  modified_base 21: mod_base = OTHER; note = 2'-O-methylcytidine-3'-phosphorothioate
  modified_base 22: mod_base = OTHER; note = 2'-O-methyluridine-3'-phosphorothioate
  modified_base 23: mod_base = OTHER; note = 2'-O-methyluridine-3'-phosphate
  misc_feature 1: note = RNA
  misc_feature 2: note = DNA
  misc_feature 3..4: note = RNA
  misc_feature 5: note = DNA
  misc_feature 6: note = RNA
  misc_feature 7: note = DNA
  misc_feature 8..11: note = RNA
  misc_feature 12: note = DNA
  misc_feature 13..23: note = RNA
actgctggaccatctatctgctt

SEQ ID NO: 7693 - DNA, 23 bp, synthetic construct
  source 1..23: mol_type = other DNA
  modified_base 1: mod_base = OTHER; note = 2'-O-methyladenosine-3'-phosphorothioate
  modified_base 2: mod_base = OTHER; note = 2'-deoxycytidine-3'-phosphorothioate
  modified_base 3: mod_base = OTHER; note = 2'-O-methylcytidine-3'-phosphate
  modified_base 4: mod_base = OTHER; note = 2'-O-methyluridine-3'-phosphate
  modified_base 6: mod_base = OTHER; note = 2'-O-methylcytidine-3'-phosphate
  modified_base 8: mod_base = OTHER; note = 2'-O-methylguanosine-3'-phosphate
  modified_base 9: mod_base = OTHER; note = 2'-O-methylguanosine-3'-phosphate
  modified_base 10: mod_base = OTHER; note = 2'-O-methyladenosine-3'-phosphate
  modified_base 11: mod_base = OTHER; note = 2'-O-methylcytidine-3'-phosphate
  modified_base 13: mod_base = OTHER; note = 2'-O-methyladenosine-3'-phosphate
  modified_base 14: mod_base = OTHER; note = 2'-fluorouridine-3'-phosphate
  modified_base 15: mod_base = OTHER; note = 2'-O-methylcytidine-3'-phosphate
  modified_base 16: mod_base = OTHER; note = 2'-O-methyluridine-3'-phosphate
  modified_base 17: mod_base = OTHER; note = 2'-O-methyladenosine-3'-phosphate
  modified_base 18: mod_base = OTHER; note = 2'-O-methyluridine-3'-phosphate
  modified_base 19: mod_base = OTHER; note = 2'-O-methylcytidine-3'-phosphate
  modified_base 20: mod_base = OTHER; note = 2'-O-methyluridine-3'-phosphate
  modified_base 21: mod_base = OTHER; note = 2'-O-methylguanosine-3'-phosphorothioate
  modified_base 22: mod_base = OTHER; note = 2'-O-methylcytidine-3'-phosphorothioate
  modified_base 23: mod_base = OTHER; note = 2'-O-methyluridine-3'-phosphate
  misc_feature 1: note = RNA
  misc_feature 2: note = DNA
  misc_feature 3..4: note = RNA
  misc_feature 5: note = DNA
  misc_feature 6: note = RNA
  misc_feature 7: note = DNA
  misc_feature 8..11: note = RNA
  misc_feature 12: note = DNA
  misc_feature 13..23: note = RNA
acctgctggaccatctatctgct

SEQ ID NO: 7694 - DNA, 23 bp, synthetic construct
  source 1..23: mol_type = other DNA
  modified_base 1: mod_base = OTHER; note = 2'-O-methyladenosine-3'-phosphorothioate
  modified_base 2: mod_base = OTHER; note = 2'-deoxyguanosine-3'-phosphorothioate
  modified_base 3: mod_base = OTHER; note = 2'-O-methylcytidine-3'-phosphate
  modified_base 4: mod_base = OTHER; note = 2'-O-methylcytidine-3'-phosphate
  modified_base 6: mod_base = OTHER; note = 2'-O-methylguanosine-3'-phosphate
  modified_base 8: mod_base = OTHER; note = 2'-O-methyluridine-3'-phosphate
  modified_base 9: mod_base = OTHER; note = 2'-O-methylguanosine-3'-phosphate
  modified_base 10: mod_base = OTHER; note = 2'-O-methylguanosine-3'-phosphate
  modified_base 11: mod_base = OTHER; note = 2'-O-methyladenosine-3'-phosphate
  modified_base 13: mod_base = OTHER; note = 2'-O-methylcytidine-3'-phosphate
  modified_base 14: mod_base = OTHER; note = 2'-fluoroadenosine-3'-phosphate
  modified_base 15: mod_base = OTHER; note = 2'-O-methyluridine-3'-phosphate
  modified_base 16: mod_base = OTHER; note = 2'-O-methylcytidine-3'-phosphate
  modified_base 17: mod_base = OTHER; note = 2'-O-methyluridine-3'-phosphate
  modified_base 18: mod_base = OTHER; note = 2'-O-methyladenosine-3'-phosphate
  modified_base 19: mod_base = OTHER; note = 2'-O-methyluridine-3'-phosphate
  modified_base 20: mod_base = OTHER; note = 2'-O-methylcytidine-3'-phosphate
  modified_base 21: mod_base = OTHER; note = 2'-O-methyluridine-3'-phosphorothioate
  modified_base 22: mod_base = OTHER; note = 2'-O-methylguanosine-3'-phosphorothioate
  modified_base 23: mod_base = OTHER; note = 2'-O-methylcytidine-3'-phosphate
  misc_feature 1: note = RNA
  misc_feature 2: note = DNA
  misc_feature 3..4: note = RNA
  misc_feature 5: note = DNA
  misc_feature 6: note = RNA
  misc_feature 7: note = DNA
  misc_feature 8..11: note = RNA
  misc_feature 12: note = DNA
  misc_feature 13..23: note = RNA
agcctgctggaccatctatctgc

SEQ ID NO: 7695 - DNA, 23 bp, synthetic construct
  source 1..23: mol_type = other DNA
  modified_base 1: mod_base = OTHER; note = 2'-O-methyladenosine-3'-phosphorothioate
  modified_base 2: mod_base = OTHER; note = 2'-deoxyadenosine-3'-phosphorothioate
  modified_base 3: mod_base = OTHER; note = 2'-O-methylguanosine-3'-phosphate
  modified_base 4: mod_base = OTHER; note = 2'-O-methylcytidine-3'-phosphate
  modified_base 6: mod_base = OTHER; note = 2'-O-methyluridine-3'-phosphate
  modified_base 8: mod_base = OTHER; note = 2'-O-methylcytidine-3'-phosphate
  modified_base 9: mod_base = OTHER; note = 2'-O-methyluridine-3'-phosphate
  modified_base 10: mod_base = OTHER; note = 2'-O-methylguanosine-3'-phosphate
  modified_base 11: mod_base = OTHER; note = 2'-O-methylguanosine-3'-phosphate
  modified_base 13: mod_base = OTHER; note = 2'-O-methylcytidine-3'-phosphate
  modified_base 14: mod_base = OTHER; note = 2'-fluorocytidine-3'-phosphate
  modified_base 15: mod_base = OTHER; note = 2'-O-methyladenosine-3'-phosphate
  modified_base 16: mod_base = OTHER; note = 2'-O-methyluridine-3'-phosphate
  modified_base 17: mod_base = OTHER; note = 2'-O-methylcytidine-3'-phosphate
  modified_base 18: mod_base = OTHER; note = 2'-O-methyluridine-3'-phosphate
  modified_base 19: mod_base = OTHER; note = 2'-O-methyladenosine-3'-phosphate
  modified_base 20: mod_base = OTHER; note = 2'-O-methyluridine-3'-phosphate
  modified_base 21: mod_base = OTHER; note = 2'-O-methylcytidine-3'-phosphorothioate
  modified_base 22: mod_base = OTHER; note = 2'-O-methyluridine-3'-phosphorothioate
  modified_base 23: mod_base = OTHER; note = 2'-O-methylguanosine-3'-phosphate
  misc_feature 1: note = RNA
  misc_feature 2: note = DNA
  misc_feature 3..4: note = RNA
  misc_feature 5: note = DNA
  misc_feature 6: note = RNA
  misc_feature 7: note = DNA
  misc_feature 8..11: note = RNA
  misc_feature 12: note = DNA
  misc_feature 13..23: note = RNA
aagcctgctggaccatctatctg

SEQ ID NO: 7696 - DNA, 23 bp, synthetic construct
  source 1..23: mol_type = other DNA
  modified_base 1: mod_base = OTHER; note = 2'-O-methyladenosine-3'-phosphorothioate
  modified_base 2: mod_base = OTHER; note = 2'-deoxyadenosine-3'-phosphorothioate
  modified_base 3: mod_base = OTHER; note = 2'-O-methyladenosine-3'-phosphate
  modified_base 4: mod_base = OTHER; note = 2'-O-methylguanosine-3'-phosphate
  modified_base 6: mod_base = OTHER; note = 2'-O-methylcytidine-3'-phosphate
  modified_base 8: mod_base = OTHER; note = 2'-O-methylguanosine-3'-phosphate
  modified_base 9: mod_base = OTHER; note = 2'-O-methylcytidine-3'-phosphate
  modified_base 10: mod_base = OTHER; note = 2'-O-methyluridine-3'-phosphate
  modified_base 11: mod_base = OTHER; note = 2'-O-methylguanosine-3'-phosphate
  modified_base 13: mod_base = OTHER; note = 2'-O-methyladenosine-3'-phosphate
  modified_base 14: mod_base = OTHER; note = 2'-fluorocytidine-3'-phosphate
  modified_base 15: mod_base = OTHER; note = 2'-O-methylcytidine-3'-phosphate
  modified_base 16: mod_base = OTHER; note = 2'-O-methyladenosine-3'-phosphate
  modified_base 17: mod_base = OTHER; note = 2'-O-methyluridine-3'-phosphate
  modified_base 18: mod_base = OTHER; note = 2'-O-methylcytidine-3'-phosphate
  modified_base 19: mod_base = OTHER; note = 2'-O-methyluridine-3'-phosphate
  modified_base 20: mod_base = OTHER; note = 2'-O-methyladenosine-3'-phosphate
  modified_base 21: mod_base = OTHER; note = 2'-O-methyluridine-3'-phosphorothioate
  modified_base 22: mod_base = OTHER; note = 2'-O-methylcytidine-3'-phosphorothioate
  modified_base 23: mod_base = OTHER; note = 2'-O-methyluridine-3'-phosphate
  misc_feature 1: note = RNA
  misc_feature 2: note = DNA
  misc_feature 3..4: note = RNA
  misc_feature 5: note = DNA
  misc_feature 6: note = RNA
  misc_feature 7: note = DNA
  misc_feature 8..11: note = RNA
  misc_feature 12: note = DNA
  misc_feature 13..23: note = RNA
aaagcctgctggaccatctatct

SEQ ID NO: 7697 - DNA, 23 bp, synthetic construct
  source 1..23: mol_type = other DNA
  modified_base 1: mod_base = OTHER; note = 2'-O-methyladenosine-3'-phosphorothioate
  modified_base 2: mod_base = OTHER; note = 2'-deoxycytidine-3'-phosphorothioate
  modified_base 3: mod_base = OTHER; note = 2'-O-methyladenosine-3'-phosphate
  modified_base 4: mod_base = OTHER; note = 2'-O-methyladenosine-3'-phosphate
  modified_base 6: mod_base = OTHER; note = 2'-O-methylcytidine-3'-phosphate
  modified_base 8: mod_base = OTHER; note = 2'-O-methyluridine-3'-phosphate
  modified_base 9: mod_base = OTHER; note = 2'-O-methylguanosine-3'-phosphate
  modified_base 10: mod_base = OTHER; note = 2'-O-methylcytidine-3'-phosphate
  modified_base 11: mod_base = OTHER; note = 2'-O-methyluridine-3'-phosphate
  modified_base 13: mod_base = OTHER; note = 2'-O-methylguanosine-3'-phosphate
  modified_base 14: mod_base = OTHER; note = 2'-fluoroadenosine-3'-phosphate
  modified_base 15: mod_base = OTHER; note = 2'-O-methylcytidine-3'-phosphate
  modified_base 16: mod_base = OTHER; note = 2'-O-methylcytidine-3'-phosphate
  modified_base 17: mod_base = OTHER; note = 2'-O-methyladenosine-3'-phosphate
  modified_base 18: mod_base = OTHER; note = 2'-O-methyluridine-3'-phosphate
  modified_base 19: mod_base = OTHER; note = 2'-O-methylcytidine-3'-phosphate
  modified_base 20: mod_base = OTHER; note = 2'-O-methyluridine-3'-phosphate
  modified_base 21: mod_base = OTHER; note = 2'-O-methyladenosine-3'-phosphorothioate
  modified_base 22: mod_base = OTHER; note = 2'-O-methyluridine-3'-phosphorothioate
  modified_base 23: mod_base = OTHER; note = 2'-O-methylcytidine-3'-phosphate
  misc_feature 1: note = RNA
  misc_feature 2: note = DNA
  misc_feature 3..4: note = RNA
  misc_feature 5: note = DNA
  misc_feature 6: note = RNA
  misc_feature 7: note = DNA
  misc_feature 8..11: note = RNA
  misc_feature 12: note = DNA
  misc_feature 13..23: note = RNA
acaagcctgctggaccatctatc

SEQ ID NO: 7698 - DNA, 23 bp, synthetic construct
  source 1..23: mol_type = other DNA
  modified_base 1: mod_base = OTHER; note = 2'-O-methyladenosine-3'-phosphorothioate
  modified_base 2: mod_base = OTHER; note = 2'-deoxythimidine-3'-phosphorothioate
  modified_base 3: mod_base = OTHER; note = 2'-O-methylcytidine-3'-phosphate
  modified_base 4: mod_base = OTHER; note = 2'-O-methyladenosine-3'-phosphate
  modified_base 6: mod_base = OTHER; note = 2'-O-methylguanosine-3'-phosphate
  modified_base 8: mod_base = OTHER; note = 2'-O-methylcytidine-3'-phosphate
  modified_base 9: mod_base = OTHER; note = 2'-O-methyluridine-3'-phosphate
  modified_base 10: mod_base = OTHER; note = 2'-O-methylguanosine-3'-phosphate
  modified_base 11: mod_base = OTHER; note = 2'-O-methylcytidine-3'-phosphate
  modified_base 13: mod_base = OTHER; note = 2'-O-methylguanosine-3'-phosphate
  modified_base 14: mod_base = OTHER; note = 2'-fluoroguanosine-3'-phosphate
  modified_base 15: mod_base = OTHER; note = 2'-O-methyladenosine-3'-phosphate
  modified_base 16: mod_base = OTHER; note = 2'-O-methylcytidine-3'-phosphate
  modified_base 17: mod_base = OTHER; note = 2'-O-methylcytidine-3'-phosphate
  modified_base 18: mod_base = OTHER; note = 2'-O-methyladenosine-3'-phosphate
  modified_base 19: mod_base = OTHER; note = 2'-O-methyluridine-3'-phosphate
  modified_base 20: mod_base = OTHER; note = 2'-O-methylcytidine-3'-phosphate
  modified_base 21: mod_base = OTHER; note = 2'-O-methyluridine-3'-phosphorothioate
  modified_base 22: mod_base = OTHER; note = 2'-O-methyladenosine-3'-phosphorothioate
  modified_base 23: mod_base = OTHER; note = 2'-O-methyluridine-3'-phosphate
  misc_feature 1: note = RNA
  misc_feature 2: note = DNA
  misc_feature 3..4: note = RNA
  misc_feature 5: note = DNA
  misc_feature 6: note = RNA
  misc_feature 7: note = DNA
  misc_feature 8..11: note = RNA
  misc_feature 12: note = DNA
  misc_feature 13..23: note = RNA
atcaagcctgctggaccatctat

SEQ ID NO: 7699 - DNA, 23 bp, synthetic construct
  source 1..23: mol_type = other DNA
  modified_base 1: mod_base = OTHER; note = 2'-O-methyladenosine-3'-phosphorothioate
  modified_base 2: mod_base = OTHER; note = 2'-deoxythimidine-3'-phosphorothioate
  modified_base 3: mod_base = OTHER; note = 2'-O-methyluridine-3'-phosphate
  modified_base 4: mod_base = OTHER; note = 2'-O-methylcytidine-3'-phosphate
  modified_base 6: mod_base = OTHER; note = 2'-O-methyladenosine-3'-phosphate
  modified_base 8: mod_base = OTHER; note = 2'-O-methylcytidine-3'-phosphate
  modified_base 9: mod_base = OTHER; note = 2'-O-methylcytidine-3'-phosphate
  modified_base 10: mod_base = OTHER; note = 2'-O-methyluridine-3'-phosphate
  modified_base 11: mod_base = OTHER; note = 2'-O-methylguanosine-3'-phosphate
  modified_base 13: mod_base = OTHER; note = 2'-O-methyluridine-3'-phosphate
  modified_base 14: mod_base = OTHER; note = 2'-fluoroguanosine-3'-phosphate
  modified_base 15: mod_base = OTHER; note = 2'-O-methylguanosine-3'-phosphate
  modified_base 16: mod_base = OTHER; note = 2'-O-methyladenosine-3'-phosphate
  modified_base 17: mod_base = OTHER; note = 2'-O-methylcytidine-3'-phosphate
  modified_base 18: mod_base = OTHER; note = 2'-O-methylcytidine-3'-phosphate
  modified_base 19: mod_base = OTHER; note = 2'-O-methyladenosine-3'-phosphate
  modified_base 20: mod_base = OTHER; note = 2'-O-methyluridine-3'-phosphate
  modified_base 21: mod_base = OTHER; note = 2'-O-methylcytidine-3'-phosphorothioate
  modified_base 22: mod_base = OTHER; note = 2'-O-methyluridine-3'-phosphorothioate
  modified_base 23: mod_base = OTHER; note = 2'-O-methyladenosine-3'-phosphate
  misc_feature 1: note = RNA
  misc_feature 2: note = DNA
  misc_feature 3..4: note = RNA
  misc_feature 5: note = DNA
  misc_feature 6: note = RNA
  misc_feature 7: note = DNA
  misc_feature 8..11: note = RNA
  misc_feature 12: note = DNA
  misc_feature 13..23: note = RNA
attcaagcctgctggaccatcta

SEQ ID NO: 7700 - DNA, 23 bp, synthetic construct
  source 1..23: mol_type = other DNA
  modified_base 1: mod_base = OTHER; note = 2'-O-methyladenosine-3'-phosphorothioate
  modified_base 2: mod_base = OTHER; note = 2'-deoxycytidine-3'-phosphorothioate
  modified_base 3: mod_base = OTHER; note = 2'-O-methyluridine-3'-phosphate
  modified_base 4: mod_base = OTHER; note = 2'-O-methyluridine-3'-phosphate
  modified_base 6: mod_base = OTHER; note = 2'-O-methyladenosine-3'-phosphate
  modified_base 8: mod_base = OTHER; note = 2'-O-methylguanosine-3'-phosphate
  modified_base 9: mod_base = OTHER; note = 2'-O-methylcytidine-3'-phosphate
  modified_base 10: mod_base = OTHER; note = 2'-O-methylcytidine-3'-phosphate
  modified_base 11: mod_base = OTHER; note = 2'-O-methyluridine-3'-phosphate
  modified_base 13: mod_base = OTHER; note = 2'-O-methylcytidine-3'-phosphate
  modified_base 14: mod_base = OTHER; note = 2'-fluorouridine-3'-phosphate
  modified_base 15: mod_base = OTHER; note = 2'-O-methylguanosine-3'-phosphate
  modified_base 16: mod_base = OTHER; note = 2'-O-methylguanosine-3'-phosphate
  modified_base 17: mod_base = OTHER; note = 2'-O-methyladenosine-3'-phosphate
  modified_base 18: mod_base = OTHER; note = 2'-O-methylcytidine-3'-phosphate
  modified_base 19: mod_base = OTHER; note = 2'-O-methylcytidine-3'-phosphate
  modified_base 20: mod_base = OTHER; note = 2'-O-methyladenosine-3'-phosphate
  modified_base 21: mod_base = OTHER; note = 2'-O-methyluridine-3'-phosphorothioate
  modified_base 22: mod_base = OTHER; note = 2'-O-methylcytidine-3'-phosphorothioate
  modified_base 23: mod_base = OTHER; note = 2'-O-methyluridine-3'-phosphate
  misc_feature 1: note = RNA
  misc_feature 2: note = DNA
  misc_feature 3..4: note = RNA
  misc_feature 5: note = DNA
  misc_feature 6: note = RNA
  misc_feature 7: note = DNA
  misc_feature 8..11: note = RNA
  misc_feature 12: note = DNA
  misc_feature 13..23: note = RNA
acttcaagcctgctggaccatct

SEQ ID NO: 7701 - DNA, 23 bp, synthetic construct
  source 1..23: mol_type = other DNA
  modified_base 1: mod_base = OTHER; note = 2'-O-methyladenosine-3'-phosphorothioate
  modified_base 2: mod_base = OTHER; note = 2'-deoxyguanosine-3'-phosphorothioate
  modified_base 3: mod_base = OTHER; note = 2'-O-methylcytidine-3'-phosphate
  modified_base 4: mod_base = OTHER; note = 2'-O-methyluridine-3'-phosphate
  modified_base 6: mod_base = OTHER; note = 2'-O-methylcytidine-3'-phosphate
  modified_base 8: mod_base = OTHER; note = 2'-O-methyladenosine-3'-phosphate
  modified_base 9: mod_base = OTHER; note = 2'-O-methylguanosine-3'-phosphate
  modified_base 10: mod_base = OTHER; note = 2'-O-methylcytidine-3'-phosphate
  modified_base 11: mod_base = OTHER; note = 2'-O-methylcytidine-3'-phosphate
  modified_base 13: mod_base = OTHER; note = 2'-O-methylguanosine-3'-phosphate
  modified_base 14: mod_base = OTHER; note = 2'-fluorocytidine-3'-phosphate
  modified_base 15: mod_base = OTHER; note = 2'-O-methyluridine-3'-phosphate
  modified_base 16: mod_base = OTHER; note = 2'-O-methylguanosine-3'-phosphate
  modified_base 17: mod_base = OTHER; note = 2'-O-methylguanosine-3'-phosphate
  modified_base 18: mod_base = OTHER; note = 2'-O-methyladenosine-3'-phosphate
  modified_base 19: mod_base = OTHER; note = 2'-O-methylcytidine-3'-phosphate
  modified_base 20: mod_base = OTHER; note = 2'-O-methylcytidine-3'-phosphate
  modified_base 21: mod_base = OTHER; note = 2'-O-methyladenosine-3'-phosphorothioate
  modified_base 22: mod_base = OTHER; note = 2'-O-methyluridine-3'-phosphorothioate
  modified_base 23: mod_base = OTHER; note = 2'-O-methylcytidine-3'-phosphate
  misc_feature 1: note = RNA
  misc_feature 2: note = DNA
  misc_feature 3..4: note = RNA
  misc_feature 5: note = DNA
  misc_feature 6: note = RNA
  misc_feature 7: note = DNA
  misc_feature 8..11: note = RNA
  misc_feature 12: note = DNA
  misc_feature 13..23: note = RNA
agcttcaagcctgctggaccatc

SEQ ID NO: 7702 - DNA, 23 bp, synthetic construct
  source 1..23: mol_type = other DNA
  modified_base 1: mod_base = OTHER; note = 2'-O-methyladenosine-3'-phosphorothioate
  modified_base 2: mod_base = OTHER; note = 2'-deoxythimidine-3'-phosphorothioate
  modified_base 3: mod_base = OTHER; note = 2'-O-methylguanosine-3'-phosphate
  modified_base 4: mod_base = OTHER; note = 2'-O-methylcytidine-3'-phosphate
  modified_base 6: mod_base = OTHER; note = 2'-O-methyluridine-3'-phosphate
  modified_base 8: mod_base = OTHER; note = 2'-O-methyladenosine-3'-phosphate
  modified_base 9: mod_base = OTHER; note = 2'-O-methyladenosine-3'-phosphate
  modified_base 10: mod_base = OTHER; note = 2'-O-methylguanosine-3'-phosphate
  modified_base 11: mod_base = OTHER; note = 2'-O-methylcytidine-3'-phosphate
  modified_base 13: mod_base = OTHER; note = 2'-O-methyluridine-3'-phosphate
  modified_base 14: mod_base = OTHER; note = 2'-fluoroguanosine-3'-phosphate
  modified_base 15: mod_base = OTHER; note = 2'-O-methylcytidine-3'-phosphate
  modified_base 16: mod_base = OTHER; note = 2'-O-methyluridine-3'-phosphate
  modified_base 17: mod_base = OTHER; note = 2'-O-methylguanosine-3'-phosphate
  modified_base 18: mod_base = OTHER; note = 2'-O-methylguanosine-3'-phosphate
  modified_base 19: mod_base = OTHER; note = 2'-O-methyladenosine-3'-phosphate
  modified_base 20: mod_base = OTHER; note = 2'-O-methylcytidine-3'-phosphate
  modified_base 21: mod_base = OTHER; note = 2'-O-methylcytidine-3'-phosphorothioate
  modified_base 22: mod_base = OTHER; note = 2'-O-methyladenosine-3'-phosphorothioate
  modified_base 23: mod_base = OTHER; note = 2'-O-methyluridine-3'-phosphate
  misc_feature 1: note = RNA
  misc_feature 2: note = DNA
  misc_feature 3..4: note = RNA
  misc_feature 5: note = DNA
  misc_feature 6: note = RNA
  misc_feature 7: note = DNA
  misc_feature 8..11: note = RNA
  misc_feature 12: note = DNA
  misc_feature 13..23: note = RNA
atgcttcaagcctgctggaccat

SEQ ID NO: 7703 - DNA, 23 bp, synthetic construct
  source 1..23: mol_type = other DNA
  modified_base 1: mod_base = OTHER; note = 2'-O-methyladenosine-3'-phosphorothioate
  modified_base 2: mod_base = OTHER; note = 2'-deoxycytidine-3'-phosphorothioate
  modified_base 3: mod_base = OTHER; note = 2'-O-methyluridine-3'-phosphate
  modified_base 4: mod_base = OTHER; note = 2'-O-methylguanosine-3'-phosphate
  modified_base 6: mod_base = OTHER; note = 2'-O-methyluridine-3'-phosphate
  modified_base 8: mod_base = OTHER; note = 2'-O-methylcytidine-3'-phosphate
  modified_base 9: mod_base = OTHER; note = 2'-O-methyladenosine-3'-phosphate
  modified_base 10: mod_base = OTHER; note = 2'-O-methyladenosine-3'-phosphate
  modified_base 11: mod_base = OTHER; note = 2'-O-methylguanosine-3'-phosphate
  modified_base 13: mod_base = OTHER; note = 2'-O-methylcytidine-3'-phosphate
  modified_base 14: mod_base = OTHER; note = 2'-fluorouridine-3'-phosphate
  modified_base 15: mod_base = OTHER; note = 2'-O-methylguanosine-3'-phosphate
  modified_base 16: mod_base = OTHER; note = 2'-O-methylcytidine-3'-phosphate
  modified_base 17: mod_base = OTHER; note = 2'-O-methyluridine-3'-phosphate
  modified_base 18: mod_base = OTHER; note = 2'-O-methylguanosine-3'-phosphate
  modified_base 19: mod_base = OTHER; note = 2'-O-methylguanosine-3'-phosphate
  modified_base 20: mod_base = OTHER; note = 2'-O-methyladenosine-3'-phosphate
  modified_base 21: mod_base = OTHER; note = 2'-O-methylcytidine-3'-phosphorothioate
  modified_base 22: mod_base = OTHER; note = 2'-O-methylcytidine-3'-phosphorothioate
  modified_base 23: mod_base = OTHER; note = 2'-O-methyladenosine-3'-phosphate
  misc_feature 1: note = RNA
  misc_feature 2: note = DNA
  misc_feature 3..4: note = RNA
  misc_feature 5: note = DNA
  misc_feature 6: note = RNA
  misc_feature 7: note = DNA
  misc_feature 8..11: note = RNA
  misc_feature 12: note = DNA
  misc_feature 13..23: note = RNA
actgcttcaagcctgctggacca

SEQ ID NO: 7704 - DNA, 23 bp, synthetic construct
  source 1..23: mol_type = other DNA
  modified_base 1: mod_base = OTHER; note = 2'-O-methyladenosine-3'-phosphorothioate
  modified_base 2: mod_base = OTHER; note = 2'-deoxycytidine-3'-phosphorothioate
  modified_base 3: mod_base = OTHER; note = 2'-O-methylcytidine-3'-phosphate
  modified_base 4: mod_base = OTHER; note = 2'-O-methylcytidine-3'-phosphate
  modified_base 6: mod_base = OTHER; note = 2'-O-methyluridine-3'-phosphate
  modified_base 8: mod_base = OTHER; note = 2'-O-methyluridine-3'-phosphate
  modified_base 9: mod_base = OTHER; note = 2'-O-methylcytidine-3'-phosphate
  modified_base 10: mod_base = OTHER; note = 2'-O-methylcytidine-3'-phosphate
  modified_base 11: mod_base = OTHER; note = 2'-O-methylcytidine-3'-phosphate
  modified_base 13: mod_base = OTHER; note = 2'-O-methylcytidine-3'-phosphate
  modified_base 14: mod_base = OTHER; note = 2'-fluorouridine-3'-phosphate
  modified_base 15: mod_base = OTHER; note = 2'-O-methyluridine-3'-phosphate
  modified_base 16: mod_base = OTHER; note = 2'-O-methylguanosine-3'-phosphate
  modified_base 17: mod_base = OTHER; note = 2'-O-methyladenosine-3'-phosphate
  modified_base 18: mod_base = OTHER; note = 2'-O-methylcytidine-3'-phosphate
  modified_base 19: mod_base = OTHER; note = 2'-O-methylcytidine-3'-phosphate
  modified_base 20: mod_base = OTHER; note = 2'-O-methyluridine-3'-phosphate
  modified_base 21: mod_base = OTHER; note = 2'-O-methyluridine-3'-phosphorothioate
  modified_base 22: mod_base = OTHER; note = 2'-O-methylcytidine-3'-phosphorothioate
  modified_base 23: mod_base = OTHER; note = 2'-O-methylcytidine-3'-phosphate
  misc_feature 1: note = RNA
  misc_feature 2: note = DNA
  misc_feature 3..4: note = RNA
  misc_feature 5: note = DNA
  misc_feature 6: note = RNA
  misc_feature 7: note = DNA
  misc_feature 8..11: note = RNA
  misc_feature 12: note = DNA
  misc_feature 13..23: note = RNA
acccatctccctcttgaccttcc

SEQ ID NO: 7705 - DNA, 23 bp, synthetic construct
  source 1..23: mol_type = other DNA
  modified_base 1: mod_base = OTHER; note = 2'-O-methyladenosine-3'-phosphorothioate
  modified_base 2: mod_base = OTHER; note = 2'-deoxyguanosine-3'-phosphorothioate
  modified_base 3: mod_base = OTHER; note = 2'-O-methylcytidine-3'-phosphate
  modified_base 4: mod_base = OTHER; note = 2'-O-methylcytidine-3'-phosphate
  modified_base 6: mod_base = OTHER; note = 2'-O-methyladenosine-3'-phosphate
  modified_base 8: mod_base = OTHER; note = 2'-O-methylcytidine-3'-phosphate
  modified_base 9: mod_base = OTHER; note = 2'-O-methyluridine-3'-phosphate
  modified_base 10: mod_base = OTHER; note = 2'-O-methylcytidine-3'-phosphate
  modified_base 11: mod_base = OTHER; note = 2'-O-methylcytidine-3'-phosphate
  modified_base 13: mod_base = OTHER; note = 2'-O-methyluridine-3'-phosphate
  modified_base 14: mod_base = OTHER; note = 2'-fluorocytidine-3'-phosphate
  modified_base 15: mod_base = OTHER; note = 2'-O-methyluridine-3'-phosphate
  modified_base 16: mod_base = OTHER; note = 2'-O-methyluridine-3'-phosphate
  modified_base 17: mod_base = OTHER; note = 2'-O-methylguanosine-3'-phosphate
  modified_base 18: mod_base = OTHER; note = 2'-O-methyladenosine-3'-phosphate
  modified_base 19: mod_base = OTHER; note = 2'-O-methylcytidine-3'-phosphate
  modified_base 20: mod_base = OTHER; note = 2'-O-methylcytidine-3'-phosphate
  modified_base 21: mod_base = OTHER; note = 2'-O-methyluridine-3'-phosphorothioate
  modified_base 22: mod_base = OTHER; note = 2'-O-methyluridine-3'-phosphorothioate
  modified_base 23: mod_base = OTHER; note = 2'-O-methylcytidine-3'-phosphate
  misc_feature 1: note = RNA
  misc_feature 2: note = DNA
  misc_feature 3..4: note = RNA
  misc_feature 5: note = DNA
  misc_feature 6: note = RNA
  misc_feature 7: note = DNA
  misc_feature 8..11: note = RNA
  misc_feature 12: note = DNA
  misc_feature 13..23: note = RNA
agcccatctccctcttgaccttc

SEQ ID NO: 7706 - DNA, 23 bp, synthetic construct
  source 1..23: mol_type = other DNA
  modified_base 1: mod_base = OTHER; note = 2'-O-methyladenosine-3'-phosphorothioate
  modified_base 2: mod_base = OTHER; note = 2'-deoxythimidine-3'-phosphorothioate
  modified_base 3: mod_base = OTHER; note = 2'-O-methylguanosine-3'-phosphate
  modified_base 4: mod_base = OTHER; note = 2'-O-methylcytidine-3'-phosphate
  modified_base 6: mod_base = OTHER; note = 2'-O-methylcytidine-3'-phosphate
  modified_base 8: mod_base = OTHER; note = 2'-O-methyluridine-3'-phosphate
  modified_base 9: mod_base = OTHER; note = 2'-O-methylcytidine-3'-phosphate
  modified_base 10: mod_base = OTHER; note = 2'-O-methyluridine-3'-phosphate
  modified_base 11: mod_base = OTHER; note = 2'-O-methylcytidine-3'-phosphate
  modified_base 13: mod_base = OTHER; note = 2'-O-methylcytidine-3'-phosphate
  modified_base 14: mod_base = OTHER; note = 2'-fluorouridine-3'-phosphate
  modified_base 15: mod_base = OTHER; note = 2'-O-methylcytidine-3'-phosphate
  modified_base 16: mod_base = OTHER; note = 2'-O-methyluridine-3'-phosphate
  modified_base 17: mod_base = OTHER; note = 2'-O-methyluridine-3'-phosphate
  modified_base 18: mod_base = OTHER; note = 2'-O-methylguanosine-3'-phosphate
  modified_base 19: mod_base = OTHER; note = 2'-O-methyladenosine-3'-phosphate
  modified_base 20: mod_base = OTHER; note = 2'-O-methylcytidine-3'-phosphate
  modified_base 21: mod_base = OTHER; note = 2'-O-methylcytidine-3'-phosphorothioate
  modified_base 22: mod_base = OTHER; note = 2'-O-methyluridine-3'-phosphorothioate
  modified_base 23: mod_base = OTHER; note = 2'-O-methyluridine-3'-phosphate
  misc_feature 1: note = RNA
  misc_feature 2: note = DNA
  misc_feature 3..4: note = RNA
  misc_feature 5: note = DNA
  misc_feature 6: note = RNA
  misc_feature 7: note = DNA
  misc_feature 8..11: note = RNA
  misc_feature 12: note = DNA
  misc_feature 13..23: note = RNA
atgcccatctccctcttgacctt

SEQ ID NO: 7707 - DNA, 23 bp, synthetic construct
  source 1..23: mol_type = other DNA
  modified_base 1: mod_base = OTHER; note = 2'-O-methyladenosine-3'-phosphorothioate
  modified_base 2: mod_base = OTHER; note = 2'-deoxythimidine-3'-phosphorothioate
  modified_base 3: mod_base = OTHER; note = 2'-O-methyluridine-3'-phosphate
  modified_base 4: mod_base = OTHER; note = 2'-O-methylguanosine-3'-phosphate
  modified_base 6: mod_base = OTHER; note = 2'-O-methylcytidine-3'-phosphate
  modified_base 8: mod_base = OTHER; note = 2'-O-methyladenosine-3'-phosphate
  modified_base 9: mod_base = OTHER; note = 2'-O-methyluridine-3'-phosphate
  modified_base 10: mod_base = OTHER; note = 2'-O-methylcytidine-3'-phosphate
  modified_base 11: mod_base = OTHER; note = 2'-O-methyluridine-3'-phosphate
  modified_base 13: mod_base = OTHER; note = 2'-O-methylcytidine-3'-phosphate
  modified_base 14: mod_base = OTHER; note = 2'-fluorocytidine-3'-phosphate
  modified_base 15: mod_base = OTHER; note = 2'-O-methyluridine-3'-phosphate
  modified_base 16: mod_base = OTHER; note = 2'-O-methylcytidine-3'-phosphate
  modified_base 17: mod_base = OTHER; note = 2'-O-methyluridine-3'-phosphate
  modified_base 18: mod_base = OTHER; note = 2'-O-methyluridine-3'-phosphate
  modified_base 19: mod_base = OTHER; note = 2'-O-methylguanosine-3'-phosphate
  modified_base 20: mod_base = OTHER; note = 2'-O-methyladenosine-3'-phosphate
  modified_base 21: mod_base = OTHER; note = 2'-O-methylcytidine-3'-phosphorothioate
  modified_base 22: mod_base = OTHER; note = 2'-O-methylcytidine-3'-phosphorothioate
  modified_base 23: mod_base = OTHER; note = 2'-O-methyluridine-3'-phosphate
  misc_feature 1: note = RNA
  misc_feature 2: note = DNA
  misc_feature 3..4: note = RNA
  misc_feature 5: note = DNA
  misc_feature 6: note = RNA
  misc_feature 7: note = DNA
  misc_feature 8..11: note = RNA
  misc_feature 12: note = DNA
  misc_feature 13..23: note = RNA
attgcccatctccctcttgacct

SEQ ID NO: 7708 - DNA, 23 bp, synthetic construct
  source 1..23: mol_type = other DNA
  modified_base 1: mod_base = OTHER; note = 2'-O-methyladenosine-3'-phosphorothioate
  modified_base 2: mod_base = OTHER; note = 2'-deoxycytidine-3'-phosphorothioate
  modified_base 3: mod_base = OTHER; note = 2'-O-methyluridine-3'-phosphate
  modified_base 4: mod_base = OTHER; note = 2'-O-methyluridine-3'-phosphate
  modified_base 6: mod_base = OTHER; note = 2'-O-methylcytidine-3'-phosphate
  modified_base 8: mod_base = OTHER; note = 2'-O-methylcytidine-3'-phosphate
  modified_base 9: mod_base = OTHER; note = 2'-O-methyladenosine-3'-phosphate
  modified_base 10: mod_base = OTHER; note = 2'-O-methyluridine-3'-phosphate
  modified_base 11: mod_base = OTHER; note = 2'-O-methylcytidine-3'-phosphate
  modified_base 13: mod_base = OTHER; note = 2'-O-methylcytidine-3'-phosphate
  modified_base 14: mod_base = OTHER; note = 2'-fluorocytidine-3'-phosphate
  modified_base 15: mod_base = OTHER; note = 2'-O-methylcytidine-3'-phosphate
  modified_base 16: mod_base = OTHER; note = 2'-O-methyluridine-3'-phosphate
  modified_base 17: mod_base = OTHER; note = 2'-O-methylcytidine-3'-phosphate
  modified_base 18: mod_base = OTHER; note = 2'-O-methyluridine-3'-phosphate
  modified_base 19: mod_base = OTHER; note = 2'-O-methyluridine-3'-phosphate
  modified_base 20: mod_base = OTHER; note = 2'-O-methylguanosine-3'-phosphate
  modified_base 21: mod_base = OTHER; note = 2'-O-methyladenosine-3'-phosphorothioate
  modified_base 22: mod_base = OTHER; note = 2'-O-methylcytidine-3'-phosphorothioate
  modified_base 23: mod_base = OTHER; note = 2'-O-methylcytidine-3'-phosphate
  misc_feature 1: note = RNA
  misc_feature 2: note = DNA
  misc_feature 3..4: note = RNA
  misc_feature 5: note = DNA
  misc_feature 6: note = RNA
  misc_feature 7: note = DNA
  misc_feature 8..11: note = RNA
  misc_feature 12: note = DNA
  misc_feature 13..23: note = RNA
acttgcccatctccctcttgacc

SEQ ID NO: 7709 - DNA, 23 bp, synthetic construct
  source 1..23: mol_type = other DNA
  modified_base 1: mod_base = OTHER; note = 2'-O-methyladenosine-3'-phosphorothioate
  modified_base 2: mod_base = OTHER; note = 2'-deoxythimidine-3'-phosphorothioate
  modified_base 3: mod_base = OTHER; note = 2'-O-methyladenosine-3'-phosphate
  modified_base 4: mod_base = OTHER; note = 2'-O-methyladenosine-3'-phosphate
  modified_base 6: mod_base = OTHER; note = 2'-O-methylcytidine-3'-phosphate
  modified_base 8: mod_base = OTHER; note = 2'-O-methyluridine-3'-phosphate
  modified_base 9: mod_base = OTHER; note = 2'-O-methylcytidine-3'-phosphate
  modified_base 10: mod_base = OTHER; note = 2'-O-methylcytidine-3'-phosphate
  modified_base 11: mod_base = OTHER; note = 2'-O-methyluridine-3'-phosphate
  modified_base 13: mod_base = OTHER; note = 2'-O-methylcytidine-3'-phosphate
  modified_base 14: mod_base = OTHER; note = 2'-fluorocytidine-3'-phosphate
  modified_base 15: mod_base = OTHER; note = 2'-O-methyluridine-3'-phosphate
  modified_base 16: mod_base = OTHER; note = 2'-O-methylcytidine-3'-phosphate
  modified_base 17: mod_base = OTHER; note = 2'-O-methyladenosine-3'-phosphate
  modified_base 18: mod_base = OTHER; note = 2'-O-methylguanosine-3'-phosphate
  modified_base 19: mod_base = OTHER; note = 2'-O-methylcytidine-3'-phosphate
  modified_base 20: mod_base = OTHER; note = 2'-O-methylguanosine-3'-phosphate
  modified_base 21: mod_base = OTHER; note = 2'-O-methylcytidine-3'-phosphorothioate
  modified_base 22: mod_base = OTHER; note = 2'-O-methylcytidine-3'-phosphorothioate
  modified_base 23: mod_base = OTHER; note = 2'-O-methyluridine-3'-phosphate
  misc_feature 1: note = RNA
  misc_feature 2: note = DNA
  misc_feature 3..4: note = RNA
  misc_feature 5: note = DNA
  misc_feature 6: note = RNA
  misc_feature 7: note = DNA
  misc_feature 8..11: note = RNA
  misc_feature 12: note = DNA
  misc_feature 13..23: note = RNA
ataagcatcctccctcagcgcct

SEQ ID NO: 7710 - DNA, 23 bp, synthetic construct
  source 1..23: mol_type = other DNA
  modified_base 1: mod_base = OTHER; note = 2'-O-methyladenosine-3'-phosphorothioate
  modified_base 2: mod_base = OTHER; note = 2'-deoxycytidine-3'-phosphorothioate
  modified_base 3: mod_base = OTHER; note = 2'-O-methyluridine-3'-phosphate
  modified_base 4: mod_base = OTHER; note = 2'-O-methyladenosine-3'-phosphate
  modified_base 6: mod_base = OTHER; note = 2'-O-methylguanosine-3'-phosphate
  modified_base 8: mod_base = OTHER; note = 2'-O-methyladenosine-3'-phosphate
  modified_base 9: mod_base = OTHER; note = 2'-O-methyluridine-3'-phosphate
  modified_base 10: mod_base = OTHER; note = 2'-O-methylcytidine-3'-phosphate
  modified_base 11: mod_base = OTHER; note = 2'-O-methylcytidine-3'-phosphate
  modified_base 13: mod_base = OTHER; note = 2'-O-methylcytidine-3'-phosphate
  modified_base 14: mod_base = OTHER; note = 2'-fluorocytidine-3'-phosphate
  modified_base 15: mod_base = OTHER; note = 2'-O-methylcytidine-3'-phosphate
  modified_base 16: mod_base = OTHER; note = 2'-O-methyluridine-3'-phosphate
  modified_base 17: mod_base = OTHER; note = 2'-O-methylcytidine-3'-phosphate
  modified_base 18: mod_base = OTHER; note = 2'-O-methyladenosine-3'-phosphate
  modified_base 19: mod_base = OTHER; note = 2'-O-methylguanosine-3'-phosphate
  modified_base 20: mod_base = OTHER; note = 2'-O-methylcytidine-3'-phosphate
  modified_base 21: mod_base = OTHER; note = 2'-O-methylguanosine-3'-phosphorothioate
  modified_base 22: mod_base = OTHER; note = 2'-O-methylcytidine-3'-phosphorothioate
  modified_base 23: mod_base = OTHER; note = 2'-O-methylcytidine-3'-phosphate
  misc_feature 1: note = RNA
  misc_feature 2: note = DNA
  misc_feature 3..4: note = RNA
  misc_feature 5: note = DNA
  misc_feature 6: note = RNA
  misc_feature 7: note = DNA
  misc_feature 8..11: note = RNA
  misc_feature 12: note = DNA
  misc_feature 13..23: note = RNA
actaagcatcctccctcagcgcc

SEQ ID NO: 7711 - DNA, 23 bp, synthetic construct
  source 1..23: mol_type = other DNA
  modified_base 1: mod_base = OTHER; note = 2'-O-methyladenosine-3'-phosphorothioate
  modified_base 2: mod_base = OTHER; note = 2'-deoxyguanosine-3'-phosphorothioate
  modified_base 3: mod_base = OTHER; note = 2'-O-methyladenosine-3'-phosphate
  modified_base 4: mod_base = OTHER; note = 2'-O-methyladenosine-3'-phosphate
  modified_base 6: mod_base = OTHER; note = 2'-O-methyluridine-3'-phosphate
  modified_base 8: mod_base = OTHER; note = 2'-O-methylcytidine-3'-phosphate
  modified_base 9: mod_base = OTHER; note = 2'-O-methyluridine-3'-phosphate
  modified_base 10: mod_base = OTHER; note = 2'-O-methyluridine-3'-phosphate
  modified_base 11: mod_base = OTHER; note = 2'-O-methyladenosine-3'-phosphate
  modified_base 13: mod_base = OTHER; note = 2'-O-methylguanosine-3'-phosphate
  modified_base 14: mod_base = OTHER; note = 2'-fluorocytidine-3'-phosphate
  modified_base 15: mod_base = OTHER; note = 2'-O-methyluridine-3'-phosphate
  modified_base 16: mod_base = OTHER; note = 2'-O-methyluridine-3'-phosphate
  modified_base 17: mod_base = OTHER; note = 2'-O-methyladenosine-3'-phosphate
  modified_base 18: mod_base = OTHER; note = 2'-O-methylguanosine-3'-phosphate
  modified_base 19: mod_base = OTHER; note = 2'-O-methyluridine-3'-phosphate
  modified_base 20: mod_base = OTHER; note = 2'-O-methylguanosine-3'-phosphate
  modified_base 21: mod_base = OTHER; note = 2'-O-methylcytidine-3'-phosphorothioate
  modified_base 22: mod_base = OTHER; note = 2'-O-methylcytidine-3'-phosphorothioate
  modified_base 23: mod_base = OTHER; note = 2'-O-methyluridine-3'-phosphate
  misc_feature 1: note = RNA
  misc_feature 2: note = DNA
  misc_feature 3..4: note = RNA
  misc_feature 5: note = DNA
  misc_feature 6: note = RNA
  misc_feature 7: note = DNA
  misc_feature 8..11: note = RNA
  misc_feature 12: note = DNA
  misc_feature 13..23: note = RNA
agaacttcttaggcttagtgcct

SEQ ID NO: 7712 - DNA, 23 bp, synthetic construct
  source 1..23: mol_type = other DNA
  modified_base 1: mod_base = OTHER; note = 2'-O-methyladenosine-3'-phosphorothioate
  modified_base 2: mod_base = OTHER; note = 2'-deoxyguanosine-3'-phosphorothioate
  modified_base 3: mod_base = OTHER; note = 2'-O-methylguanosine-3'-phosphate
  modified_base 4: mod_base = OTHER; note = 2'-O-methyladenosine-3'-phosphate
  modified_base 6: mod_base = OTHER; note = 2'-O-methylcytidine-3'-phosphate
  modified_base 8: mod_base = OTHER; note = 2'-O-methyluridine-3'-phosphate
  modified_base 9: mod_base = OTHER; note = 2'-O-methylcytidine-3'-phosphate
  modified_base 10: mod_base = OTHER; note = 2'-O-methyluridine-3'-phosphate
  modified_base 11: mod_base = OTHER; note = 2'-O-methyluridine-3'-phosphate
  modified_base 13: mod_base = OTHER; note = 2'-O-methylguanosine-3'-phosphate
  modified_base 14: mod_base = OTHER; note = 2'-fluoroguanosine-3'-phosphate
  modified_base 15: mod_base = OTHER; note = 2'-O-methylcytidine-3'-phosphate
  modified_base 16: mod_base = OTHER; note = 2'-O-methyluridine-3'-phosphate
  modified_base 17: mod_base = OTHER; note = 2'-O-methyluridine-3'-phosphate
  modified_base 18: mod_base = OTHER; note = 2'-O-methyladenosine-3'-phosphate
  modified_base 19: mod_base = OTHER; note = 2'-O-methylguanosine-3'-phosphate
  modified_base 20: mod_base = OTHER; note = 2'-O-methyluridine-3'-phosphate
  modified_base 21: mod_base = OTHER; note = 2'-O-methylguanosine-3'-phosphorothioate
  modified_base 22: mod_base = OTHER; note = 2'-O-methylcytidine-3'-phosphorothioate
  modified_base 23: mod_base = OTHER; note = 2'-O-methylcytidine-3'-phosphate
  misc_feature 1: note = RNA
  misc_feature 2: note = DNA
  misc_feature 3..4: note = RNA
  misc_feature 5: note = DNA
  misc_feature 6: note = RNA
  misc_feature 7: note = DNA
  misc_feature 8..11: note = RNA
  misc_feature 12: note = DNA
  misc_feature 13..23: note = RNA
aggaacttcttaggcttagtgcc

SEQ ID NO: 7713 - DNA, 23 bp, synthetic construct
  source 1..23: mol_type = other DNA
  modified_base 1: mod_base = OTHER; note = 2'-O-methyladenosine-3'-phosphorothioate
  modified_base 2: mod_base = OTHER; note = 2'-deoxythimidine-3'-phosphorothioate
  modified_base 3: mod_base = OTHER; note = 2'-O-methylguanosine-3'-phosphate
  modified_base 4: mod_base = OTHER; note = 2'-O-methyluridine-3'-phosphate
  modified_base 6: mod_base = OTHER; note = 2'-O-methyluridine-3'-phosphate
  modified_base 8: mod_base = OTHER; note = 2'-O-methylcytidine-3'-phosphate
  modified_base 9: mod_base = OTHER; note = 2'-O-methylcytidine-3'-phosphate
  modified_base 10: mod_base = OTHER; note = 2'-O-methyladenosine-3'-phosphate
  modified_base 11: mod_base = OTHER; note = 2'-O-methylguanosine-3'-phosphate
  modified_base 13: mod_base = OTHER; note = 2'-O-methylguanosine-3'-phosphate
  modified_base 14: mod_base = OTHER; note = 2'-fluoroguanosine-3'-phosphate
  modified_base 15: mod_base = OTHER; note = 2'-O-methylguanosine-3'-phosphate
  modified_base 16: mod_base = OTHER; note = 2'-O-methyluridine-3'-phosphate
  modified_base 17: mod_base = OTHER; note = 2'-O-methylcytidine-3'-phosphate
  modified_base 18: mod_base = OTHER; note = 2'-O-methylcytidine-3'-phosphate
  modified_base 19: mod_base = OTHER; note = 2'-O-methyluridine-3'-phosphate
  modified_base 20: mod_base = OTHER; note = 2'-O-methylguanosine-3'-phosphate
  modified_base 21: mod_base = OTHER; note = 2'-O-methyluridine-3'-phosphorothioate
  modified_base 22: mod_base = OTHER; note = 2'-O-methylcytidine-3'-phosphorothioate
  modified_base 23: mod_base = OTHER; note = 2'-O-methylcytidine-3'-phosphate
  misc_feature 1: note = RNA
  misc_feature 2: note = DNA
  misc_feature 3..4: note = RNA
  misc_feature 5: note = DNA
  misc_feature 6: note = RNA
  misc_feature 7: note = DNA
  misc_feature 8..11: note = RNA
  misc_feature 12: note = DNA
  misc_feature 13..23: note = RNA
atgtctcccagtgggtcctgtcc

SEQ ID NO: 7714 - DNA, 23 bp, synthetic construct
  source 1..23: mol_type = other DNA
  modified_base 1: mod_base = OTHER; note = 2'-O-methyladenosine-3'-phosphorothioate
  modified_base 2: mod_base = OTHER; note = 2'-deoxythimidine-3'-phosphorothioate
  modified_base 3: mod_base = OTHER; note = 2'-O-methyluridine-3'-phosphate
  modified_base 4: mod_base = OTHER; note = 2'-O-methylguanosine-3'-phosphate
  modified_base 6: mod_base = OTHER; note = 2'-O-methylcytidine-3'-phosphate
  modified_base 8: mod_base = OTHER; note = 2'-O-methylcytidine-3'-phosphate
  modified_base 9: mod_base = OTHER; note = 2'-O-methylcytidine-3'-phosphate
  modified_base 10: mod_base = OTHER; note = 2'-O-methylcytidine-3'-phosphate
  modified_base 11: mod_base = OTHER; note = 2'-O-methyladenosine-3'-phosphate
  modified_base 13: mod_base = OTHER; note = 2'-O-methyluridine-3'-phosphate
  modified_base 14: mod_base = OTHER; note = 2'-fluoroguanosine-3'-phosphate
  modified_base 15: mod_base = OTHER; note = 2'-O-methylguanosine-3'-phosphate
  modified_base 16: mod_base = OTHER; note = 2'-O-methylguanosine-3'-phosphate
  modified_base 17: mod_base = OTHER; note = 2'-O-methyluridine-3'-phosphate
  modified_base 18: mod_base = OTHER; note = 2'-O-methylcytidine-3'-phosphate
  modified_base 19: mod_base = OTHER; note = 2'-O-methylcytidine-3'-phosphate
  modified_base 20: mod_base = OTHER; note = 2'-O-methyluridine-3'-phosphate
  modified_base 21: mod_base = OTHER; note = 2'-O-methylguanosine-3'-phosphorothioate
  modified_base 22: mod_base = OTHER; note = 2'-O-methyluridine-3'-phosphorothioate
  modified_base 23: mod_base = OTHER; note = 2'-O-methylcytidine-3'-phosphate
  misc_feature 1: note = RNA
  misc_feature 2: note = DNA
  misc_feature 3..4: note = RNA
  misc_feature 5: note = DNA
  misc_feature 6: note = RNA
  misc_feature 7: note = DNA
  misc_feature 8..11: note = RNA
  misc_feature 12: note = DNA
  misc_feature 13..23: note = RNA
attgtctcccagtgggtcctgtc

SEQ ID NO: 7715 - DNA, 23 bp, synthetic construct
  source 1..23: mol_type = other DNA
  modified_base 1: mod_base = OTHER; note = 2'-O-methyladenosine-3'-phosphorothioate
  modified_base 2: mod_base = OTHER; note = 2'-deoxycytidine-3'-phosphorothioate
  modified_base 3: mod_base = OTHER; note = 2'-O-methyluridine-3'-phosphate
  modified_base 4: mod_base = OTHER; note = 2'-O-methyluridine-3'-phosphate
  modified_base 6: mod_base = OTHER; note = 2'-O-methyluridine-3'-phosphate
  modified_base 8: mod_base = OTHER; note = 2'-O-methyluridine-3'-phosphate
  modified_base 9: mod_base = OTHER; note = 2'-O-methylcytidine-3'-phosphate
  modified_base 10: mod_base = OTHER; note = 2'-O-methylcytidine-3'-phosphate
  modified_base 11: mod_base = OTHER; note = 2'-O-methylcytidine-3'-phosphate
  modified_base 13: mod_base = OTHER; note = 2'-O-methylguanosine-3'-phosphate
  modified_base 14: mod_base = OTHER; note = 2'-fluorouridine-3'-phosphate
  modified_base 15: mod_base = OTHER; note = 2'-O-methylguanosine-3'-phosphate
  modified_base 16: mod_base = OTHER; note = 2'-O-methylguanosine-3'-phosphate
  modified_base 17: mod_base = OTHER; note = 2'-O-methylguanosine-3'-phosphate
  modified_base 18: mod_base = OTHER; note = 2'-O-methyluridine-3'-phosphate
  modified_base 19: mod_base = OTHER; note = 2'-O-methylcytidine-3'-phosphate
  modified_base 20: mod_base = OTHER; note = 2'-O-methylcytidine-3'-phosphate
  modified_base 21: mod_base = OTHER; note = 2'-O-methyluridine-3'-phosphorothioate
  modified_base 22: mod_base = OTHER; note = 2'-O-methylguanosine-3'-phosphorothioate
  modified_base 23: mod_base = OTHER; note = 2'-O-methyluridine-3'-phosphate
  misc_feature 1: note = RNA
  misc_feature 2: note = DNA
  misc_feature 3..4: note = RNA
  misc_feature 5: note = DNA
  misc_feature 6: note = RNA
  misc_feature 7: note = DNA
  misc_feature 8..11: note = RNA
  misc_feature 12: note = DNA
  misc_feature 13..23: note = RNA
acttgtctcccagtgggtcctgt

SEQ ID NO: 7716 - DNA, 23 bp, synthetic construct
  source 1..23: mol_type = other DNA
  modified_base 1: mod_base = OTHER; note = 2'-O-methyladenosine-3'-phosphorothioate
  modified_base 2: mod_base = OTHER; note = 2'-deoxyguanosine-3'-phosphorothioate
  modified_base 3: mod_base = OTHER; note = 2'-O-methylcytidine-3'-phosphate
  modified_base 4: mod_base = OTHER; note = 2'-O-methyluridine-3'-phosphate
  modified_base 6: mod_base = OTHER; note = 2'-O-methylguanosine-3'-phosphate
  modified_base 8: mod_base = OTHER; note = 2'-O-methylcytidine-3'-phosphate
  modified_base 9: mod_base = OTHER; note = 2'-O-methyluridine-3'-phosphate
  modified_base 10: mod_base = OTHER; note = 2'-O-methylcytidine-3'-phosphate
  modified_base 11: mod_base = OTHER; note = 2'-O-methylcytidine-3'-phosphate
  modified_base 13: mod_base = OTHER; note = 2'-O-methyladenosine-3'-phosphate
  modified_base 14: mod_base = OTHER; note = 2'-fluoroguanosine-3'-phosphate
  modified_base 15: mod_base = OTHER; note = 2'-O-methyluridine-3'-phosphate
  modified_base 16: mod_base = OTHER; note = 2'-O-methylguanosine-3'-phosphate
  modified_base 17: mod_base = OTHER; note = 2'-O-methylguanosine-3'-phosphate
  modified_base 18: mod_base = OTHER; note = 2'-O-methylguanosine-3'-phosphate
  modified_base 19: mod_base = OTHER; note = 2'-O-methyluridine-3'-phosphate
  modified_base 20: mod_base = OTHER; note = 2'-O-methylcytidine-3'-phosphate
  modified_base 21: mod_base = OTHER; note = 2'-O-methylcytidine-3'-phosphorothioate
  modified_base 22: mod_base = OTHER; note = 2'-O-methyluridine-3'-phosphorothioate
  modified_base 23: mod_base = OTHER; note = 2'-O-methylguanosine-3'-phosphate
  misc_feature 1: note = RNA
  misc_feature 2: note = DNA
  misc_feature 3..4: note = RNA
  misc_feature 5: note = DNA
  misc_feature 6: note = RNA
  misc_feature 7: note = DNA
  misc_feature 8..11: note = RNA
  misc_feature 12: note = DNA
  misc_feature 13..23: note = RNA
agcttgtctcccagtgggtcctg

SEQ ID NO: 7717 - DNA, 23 bp, synthetic construct
  source 1..23: mol_type = other DNA
  modified_base 1: mod_base = OTHER; note = 2'-O-methyladenosine-3'-phosphorothioate
  modified_base 2: mod_base = OTHER; note = 2'-deoxythimidine-3'-phosphorothioate
  modified_base 3: mod_base = OTHER; note = 2'-O-methylguanosine-3'-phosphate
  modified_base 4: mod_base = OTHER; note = 2'-O-methylcytidine-3'-phosphate
  modified_base 6: mod_base = OTHER; note = 2'-O-methyluridine-3'-phosphate
  modified_base 8: mod_base = OTHER; note = 2'-O-methyluridine-3'-phosphate
  modified_base 9: mod_base = OTHER; note = 2'-O-methylcytidine-3'-phosphate
  modified_base 10: mod_base = OTHER; note = 2'-O-methyluridine-3'-phosphate
  modified_base 11: mod_base = OTHER; note = 2'-O-methylcytidine-3'-phosphate
  modified_base 13: mod_base = OTHER; note = 2'-O-methylcytidine-3'-phosphate
  modified_base 14: mod_base = OTHER; note = 2'-fluoroadenosine-3'-phosphate
  modified_base 15: mod_base = OTHER; note = 2'-O-methylguanosine-3'-phosphate
  modified_base 16: mod_base = OTHER; note = 2'-O-methyluridine-3'-phosphate
  modified_base 17: mod_base = OTHER; note = 2'-O-methylguanosine-3'-phosphate
  modified_base 18: mod_base = OTHER; note = 2'-O-methylguanosine-3'-phosphate
  modified_base 19: mod_base = OTHER; note = 2'-O-methylguanosine-3'-phosphate
  modified_base 20: mod_base = OTHER; note = 2'-O-methyluridine-3'-phosphate
  modified_base 21: mod_base = OTHER; note = 2'-O-methylcytidine-3'-phosphorothioate
  modified_base 22: mod_base = OTHER; note = 2'-O-methylcytidine-3'-phosphorothioate
  modified_base 23: mod_base = OTHER; note = 2'-O-methyluridine-3'-phosphate
  misc_feature 1: note = RNA
  misc_feature 2: note = DNA
  misc_feature 3..4: note = RNA
  misc_feature 5: note = DNA
  misc_feature 6: note = RNA
  misc_feature 7: note = DNA
  misc_feature 8..11: note = RNA
  misc_feature 12: note = DNA
  misc_feature 13..23: note = RNA
atgcttgtctcccagtgggtcct

SEQ ID NO: 7718 - DNA, 23 bp, synthetic construct
  source 1..23: mol_type = other DNA
  modified_base 1: mod_base = OTHER; note = 2'-O-methyladenosine-3'-phosphorothioate
  modified_base 2: mod_base = OTHER; note = 2'-deoxyadenosine-3'-phosphorothioate
  modified_base 3: mod_base = OTHER; note = 2'-O-methyluridine-3'-phosphate
  modified_base 4: mod_base = OTHER; note = 2'-O-methylguanosine-3'-phosphate
  modified_base 6: mod_base = OTHER; note = 2'-O-methyluridine-3'-phosphate
  modified_base 8: mod_base = OTHER; note = 2'-O-methylguanosine-3'-phosphate
  modified_base 9: mod_base = OTHER; note = 2'-O-methyluridine-3'-phosphate
  modified_base 10: mod_base = OTHER; note = 2'-O-methylcytidine-3'-phosphate
  modified_base 11: mod_base = OTHER; note = 2'-O-methyluridine-3'-phosphate
  modified_base 13: mod_base = OTHER; note = 2'-O-methylcytidine-3'-phosphate
  modified_base 14: mod_base = OTHER; note = 2'-fluorocytidine-3'-phosphate
  modified_base 15: mod_base = OTHER; note = 2'-O-methyladenosine-3'-phosphate
  modified_base 16: mod_base = OTHER; note = 2'-O-methylguanosine-3'-phosphate
  modified_base 17: mod_base = OTHER; note = 2'-O-methyluridine-3'-phosphate
  modified_base 18: mod_base = OTHER; note = 2'-O-methylguanosine-3'-phosphate
  modified_base 19: mod_base = OTHER; note = 2'-O-methylguanosine-3'-phosphate
  modified_base 20: mod_base = OTHER; note = 2'-O-methylguanosine-3'-phosphate
  modified_base 21: mod_base = OTHER; note = 2'-O-methyluridine-3'-phosphorothioate
  modified_base 22: mod_base = OTHER; note = 2'-O-methylcytidine-3'-phosphorothioate
  modified_base 23: mod_base = OTHER; note = 2'-O-methylcytidine-3'-phosphate
  misc_feature 1: note = RNA
  misc_feature 2: note = DNA
  misc_feature 3..4: note = RNA
  misc_feature 5: note = DNA
  misc_feature 6: note = RNA
  misc_feature 7: note = DNA
  misc_feature 8..11: note = RNA
  misc_feature 12: note = DNA
  misc_feature 13..23: note = RNA
aatgcttgtctcccagtgggtcc

SEQ ID NO: 7719 - DNA, 23 bp, synthetic construct
  source 1..23: mol_type = other DNA
  modified_base 1: mod_base = OTHER; note = 2'-O-methyladenosine-3'-phosphorothioate
  modified_base 2: mod_base = OTHER; note = 2'-deoxyadenosine-3'-phosphorothioate
  modified_base 3: mod_base = OTHER; note = 2'-O-methyladenosine-3'-phosphate
  modified_base 4: mod_base = OTHER; note = 2'-O-methyluridine-3'-phosphate
  modified_base 6: mod_base = OTHER; note = 2'-O-methylcytidine-3'-phosphate
  modified_base 8: mod_base = OTHER; note = 2'-O-methyluridine-3'-phosphate
  modified_base 9: mod_base = OTHER; note = 2'-O-methylguanosine-3'-phosphate
  modified_base 10: mod_base = OTHER; note = 2'-O-methyluridine-3'-phosphate
  modified_base 11: mod_base = OTHER; note = 2'-O-methylcytidine-3'-phosphate
  modified_base 13: mod_base = OTHER; note = 2'-O-methylcytidine-3'-phosphate
  modified_base 14: mod_base = OTHER; note = 2'-fluorocytidine-3'-phosphate
  modified_base 15: mod_base = OTHER; note = 2'-O-methylcytidine-3'-phosphate
  modified_base 16: mod_base = OTHER; note = 2'-O-methyladenosine-3'-phosphate
  modified_base 17: mod_base = OTHER; note = 2'-O-methylguanosine-3'-phosphate
  modified_base 18: mod_base = OTHER; note = 2'-O-methyluridine-3'-phosphate
  modified_base 19: mod_base = OTHER; note = 2'-O-methylguanosine-3'-phosphate
  modified_base 20: mod_base = OTHER; note = 2'-O-methylguanosine-3'-phosphate
  modified_base 21: mod_base = OTHER; note = 2'-O-methylguanosine-3'-phosphorothioate
  modified_base 22: mod_base = OTHER; note = 2'-O-methyluridine-3'-phosphorothioate
  modified_base 23: mod_base = OTHER; note = 2'-O-methylcytidine-3'-phosphate
  misc_feature 1: note = RNA
  misc_feature 2: note = DNA
  misc_feature 3..4: note = RNA
  misc_feature 5: note = DNA
  misc_feature 6: note = RNA
  misc_feature 7: note = DNA
  misc_feature 8..11: note = RNA
  misc_feature 12: note = DNA
  misc_feature 13..23: note = RNA
aaatgcttgtctcccagtgggtc

SEQ ID NO: 7720 - DNA, 23 bp, synthetic construct
  source 1..23: mol_type = other DNA
  modified_base 1: mod_base = OTHER; note = 2'-O-methyladenosine-3'-phosphorothioate
  modified_base 2: mod_base = OTHER; note = 2'-deoxyadenosine-3'-phosphorothioate
  modified_base 3: mod_base = OTHER; note = 2'-O-methyladenosine-3'-phosphate
  modified_base 4: mod_base = OTHER; note = 2'-O-methyladenosine-3'-phosphate
  modified_base 6: mod_base = OTHER; note = 2'-O-methylguanosine-3'-phosphate
  modified_base 8: mod_base = OTHER; note = 2'-O-methyluridine-3'-phosphate
  modified_base 9: mod_base = OTHER; note = 2'-O-methyluridine-3'-phosphate
  modified_base 10: mod_base = OTHER; note = 2'-O-methylguanosine-3'-phosphate
  modified_base 11: mod_base = OTHER; note = 2'-O-methyluridine-3'-phosphate
  modified_base 13: mod_base = OTHER; note = 2'-O-methyluridine-3'-phosphate
  modified_base 14: mod_base = OTHER; note = 2'-fluorocytidine-3'-phosphate
  modified_base 15: mod_base = OTHER; note = 2'-O-methylcytidine-3'-phosphate
  modified_base 16: mod_base = OTHER; note = 2'-O-methylcytidine-3'-phosphate
  modified_base 17: mod_base = OTHER; note = 2'-O-methyladenosine-3'-phosphate
  modified_base 18: mod_base = OTHER; note = 2'-O-methylguanosine-3'-phosphate
  modified_base 19: mod_base = OTHER; note = 2'-O-methyluridine-3'-phosphate
  modified_base 20: mod_base = OTHER; note = 2'-O-methylguanosine-3'-phosphate
  modified_base 21: mod_base = OTHER; note = 2'-O-methylguanosine-3'-phosphorothioate
  modified_base 22: mod_base = OTHER; note = 2'-O-methylguanosine-3'-phosphorothioate
  modified_base 23: mod_base = OTHER; note = 2'-O-methyluridine-3'-phosphate
  misc_feature 1: note = RNA
  misc_feature 2: note = DNA
  misc_feature 3..4: note = RNA
  misc_feature 5: note = DNA
  misc_feature 6: note = RNA
  misc_feature 7: note = DNA
  misc_feature 8..11: note = RNA
  misc_feature 12: note = DNA
  misc_feature 13..23: note = RNA
aaaatgcttgtctcccagtgggt

SEQ ID NO: 7721 - DNA, 23 bp, synthetic construct
  source 1..23: mol_type = other DNA
  modified_base 1: mod_base = OTHER; note = 2'-O-methyladenosine-3'-phosphorothioate
  modified_base 2: mod_base = OTHER; note = 2'-deoxythimidine-3'-phosphorothioate
  modified_base 3: mod_base = OTHER; note = 2'-O-methyladenosine-3'-phosphate
  modified_base 4: mod_base = OTHER; note = 2'-O-methyladenosine-3'-phosphate
  modified_base 6: mod_base = OTHER; note = 2'-O-methyluridine-3'-phosphate
  modified_base 8: mod_base = OTHER; note = 2'-O-methylcytidine-3'-phosphate
  modified_base 9: mod_base = OTHER; note = 2'-O-methyluridine-3'-phosphate
  modified_base 10: mod_base = OTHER; note = 2'-O-methyluridine-3'-phosphate
  modified_base 11: mod_base = OTHER; note = 2'-O-methylguanosine-3'-phosphate
  modified_base 13: mod_base = OTHER; note = 2'-O-methylcytidine-3'-phosphate
  modified_base 14: mod_base = OTHER; note = 2'-fluorouridine-3'-phosphate
  modified_base 15: mod_base = OTHER; note = 2'-O-methylcytidine-3'-phosphate
  modified_base 16: mod_base = OTHER; note = 2'-O-methylcytidine-3'-phosphate
  modified_base 17: mod_base = OTHER; note = 2'-O-methylcytidine-3'-phosphate
  modified_base 18: mod_base = OTHER; note = 2'-O-methyladenosine-3'-phosphate
  modified_base 19: mod_base = OTHER; note = 2'-O-methylguanosine-3'-phosphate
  modified_base 20: mod_base = OTHER; note = 2'-O-methyluridine-3'-phosphate
  modified_base 21: mod_base = OTHER; note = 2'-O-methylguanosine-3'-phosphorothioate
  modified_base 22: mod_base = OTHER; note = 2'-O-methylguanosine-3'-phosphorothioate
  modified_base 23: mod_base = OTHER; note = 2'-O-methylguanosine-3'-phosphate
  misc_feature 1: note = RNA
  misc_feature 2: note = DNA
  misc_feature 3..4: note = RNA
  misc_feature 5: note = DNA
  misc_feature 6: note = RNA
  misc_feature 7: note = DNA
  misc_feature 8..11: note = RNA
  misc_feature 12: note = DNA
  misc_feature 13..23: note = RNA
ataaatgcttgtctcccagtggg

SEQ ID NO: 7722 - DNA, 23 bp, synthetic construct
  source 1..23: mol_type = other DNA
  modified_base 1: mod_base = OTHER; note = 2'-O-methyladenosine-3'-phosphorothioate
  modified_base 2: mod_base = OTHER; note = 2'-deoxyadenosine-3'-phosphorothioate
  modified_base 3: mod_base = OTHER; note = 2'-O-methyluridine-3'-phosphate
  modified_base 4: mod_base = OTHER; note = 2'-O-methyladenosine-3'-phosphate
  modified_base 6: mod_base = OTHER; note = 2'-O-methyladenosine-3'-phosphate
  modified_base 8: mod_base = OTHER; note = 2'-O-methylguanosine-3'-phosphate
  modified_base 9: mod_base = OTHER; note = 2'-O-methylcytidine-3'-phosphate
  modified_base 10: mod_base = OTHER; note = 2'-O-methyluridine-3'-phosphate
  modified_base 11: mod_base = OTHER; note = 2'-O-methyluridine-3'-phosphate
  modified_base 13: mod_base = OTHER; note = 2'-O-methyluridine-3'-phosphate
  modified_base 14: mod_base = OTHER; note = 2'-fluorocytidine-3'-phosphate
  modified_base 15: mod_base = OTHER; note = 2'-O-methyluridine-3'-phosphate
  modified_base 16: mod_base = OTHER; note = 2'-O-methylcytidine-3'-phosphate
  modified_base 17: mod_base = OTHER; note = 2'-O-methylcytidine-3'-phosphate
  modified_base 18: mod_base = OTHER; note = 2'-O-methylcytidine-3'-phosphate
  modified_base 19: mod_base = OTHER; note = 2'-O-methyladenosine-3'-phosphate
  modified_base 20: mod_base = OTHER; note = 2'-O-methylguanosine-3'-phosphate
  modified_base 21: mod_base = OTHER; note = 2'-O-methyluridine-3'-phosphorothioate
  modified_base 22: mod_base = OTHER; note = 2'-O-methylguanosine-3'-phosphorothioate
  modified_base 23: mod_base = OTHER; note = 2'-O-methylguanosine-3'-phosphate
  misc_feature 1: note = RNA
  misc_feature 2: note = DNA
  misc_feature 3..4: note = RNA
  misc_feature 5: note = DNA
  misc_feature 6: note = RNA
  misc_feature 7: note = DNA
  misc_feature 8..11: note = RNA
  misc_feature 12: note = DNA
  misc_feature 13..23: note = RNA
aataaatgcttgtctcccagtgg

SEQ ID NO: 7723 - DNA, 23 bp, synthetic construct
  source 1..23: mol_type = other DNA
  modified_base 1: mod_base = OTHER; note = 2'-O-methyladenosine-3'-phosphorothioate
  modified_base 2: mod_base = OTHER; note = 2'-deoxythimidine-3'-phosphorothioate
  modified_base 3: mod_base = OTHER; note = 2'-O-methyladenosine-3'-phosphate
  modified_base 4: mod_base = OTHER; note = 2'-O-methyluridine-3'-phosphate
  modified_base 6: mod_base = OTHER; note = 2'-O-methyladenosine-3'-phosphate
  modified_base 8: mod_base = OTHER; note = 2'-O-methyluridine-3'-phosphate
  modified_base 9: mod_base = OTHER; note = 2'-O-methylguanosine-3'-phosphate
  modified_base 10: mod_base = OTHER; note = 2'-O-methylcytidine-3'-phosphate
  modified_base 11: mod_base = OTHER; note = 2'-O-methyluridine-3'-phosphate
  modified_base 13: mod_base = OTHER; note = 2'-O-methylguanosine-3'-phosphate
  modified_base 14: mod_base = OTHER; note = 2'-fluorouridine-3'-phosphate
  modified_base 15: mod_base = OTHER; note = 2'-O-methylcytidine-3'-phosphate
  modified_base 16: mod_base = OTHER; note = 2'-O-methyluridine-3'-phosphate
  modified_base 17: mod_base = OTHER; note = 2'-O-methylcytidine-3'-phosphate
  modified_base 18: mod_base = OTHER; note = 2'-O-methylcytidine-3'-phosphate
  modified_base 19: mod_base = OTHER; note = 2'-O-methylcytidine-3'-phosphate
  modified_base 20: mod_base = OTHER; note = 2'-O-methyladenosine-3'-phosphate
  modified_base 21: mod_base = OTHER; note = 2'-O-methylguanosine-3'-phosphorothioate
  modified_base 22: mod_base = OTHER; note = 2'-O-methyluridine-3'-phosphorothioate
  modified_base 23: mod_base = OTHER; note = 2'-O-methylguanosine-3'-phosphate
  misc_feature 1: note = RNA
  misc_feature 2: note = DNA
  misc_feature 3..4: note = RNA
  misc_feature 5: note = DNA
  misc_feature 6: note = RNA
  misc_feature 7: note = DNA
  misc_feature 8..11: note = RNA
  misc_feature 12: note = DNA
  misc_feature 13..23: note = RNA
atataaatgcttgtctcccagtg

SEQ ID NO: 7724 - DNA, 23 bp, synthetic construct
  source 1..23: mol_type = other DNA
  modified_base 1: mod_base = OTHER; note = 2'-O-methyladenosine-3'-phosphorothioate
  modified_base 2: mod_base = OTHER; note = 2'-deoxyguanosine-3'-phosphorothioate
  modified_base 3: mod_base = OTHER; note = 2'-O-methyluridine-3'-phosphate
  modified_base 4: mod_base = OTHER; note = 2'-O-methyladenosine-3'-phosphate
  modified_base 6: mod_base = OTHER; note = 2'-O-methyladenosine-3'-phosphate
  modified_base 8: mod_base = OTHER; note = 2'-O-methyladenosine-3'-phosphate
  modified_base 9: mod_base = OTHER; note = 2'-O-methyluridine-3'-phosphate
  modified_base 10: mod_base = OTHER; note = 2'-O-methylguanosine-3'-phosphate
  modified_base 11: mod_base = OTHER; note = 2'-O-methylcytidine-3'-phosphate
  modified_base 13: mod_base = OTHER; note = 2'-O-methyluridine-3'-phosphate
  modified_base 14: mod_base = OTHER; note = 2'-fluoroguanosine-3'-phosphate
  modified_base 15: mod_base = OTHER; note = 2'-O-methyluridine-3'-phosphate
  modified_base 16: mod_base = OTHER; note = 2'-O-methylcytidine-3'-phosphate
  modified_base 17: mod_base = OTHER; note = 2'-O-methyluridine-3'-phosphate
  modified_base 18: mod_base = OTHER; note = 2'-O-methylcytidine-3'-phosphate
  modified_base 19: mod_base = OTHER; note = 2'-O-methylcytidine-3'-phosphate
  modified_base 20: mod_base = OTHER; note = 2'-O-methylcytidine-3'-phosphate
  modified_base 21: mod_base = OTHER; note = 2'-O-methyladenosine-3'-phosphorothioate
  modified_base 22: mod_base = OTHER; note = 2'-O-methylguanosine-3'-phosphorothioate
  modified_base 23: mod_base = OTHER; note = 2'-O-methyluridine-3'-phosphate
  misc_feature 1: note = RNA
  misc_feature 2: note = DNA
  misc_feature 3..4: note = RNA
  misc_feature 5: note = DNA
  misc_feature 6: note = RNA
  misc_feature 7: note = DNA
  misc_feature 8..11: note = RNA
  misc_feature 12: note = DNA
  misc_feature 13..23: note = RNA
agtataaatgcttgtctcccagt

SEQ ID NO: 7725 - DNA, 23 bp, synthetic construct
  source 1..23: mol_type = other DNA
  modified_base 1: mod_base = OTHER; note = 2'-O-methyladenosine-3'-phosphorothioate
  modified_base 2: mod_base = OTHER; note = 2'-deoxyadenosine-3'-phosphorothioate
  modified_base 3: mod_base = OTHER; note = 2'-O-methyladenosine-3'-phosphate
  modified_base 4: mod_base = OTHER; note = 2'-O-methylguanosine-3'-phosphate
  modified_base 6: mod_base = OTHER; note = 2'-O-methyladenosine-3'-phosphate
  modified_base 8: mod_base = OTHER; note = 2'-O-methyladenosine-3'-phosphate
  modified_base 9: mod_base = OTHER; note = 2'-O-methyladenosine-3'-phosphate
  modified_base 10: mod_base = OTHER; note = 2'-O-methyladenosine-3'-phosphate
  modified_base 11: mod_base = OTHER; note = 2'-O-methyluridine-3'-phosphate
  modified_base 13: mod_base = OTHER; note = 2'-O-methylcytidine-3'-phosphate
  modified_base 14: mod_base = OTHER; note = 2'-fluorouridine-3'-phosphate
  modified_base 15: mod_base = OTHER; note = 2'-O-methyluridine-3'-phosphate
  modified_base 16: mod_base = OTHER; note = 2'-O-methylguanosine-3'-phosphate
  modified_base 17: mod_base = OTHER; note = 2'-O-methyluridine-3'-phosphate
  modified_base 18: mod_base = OTHER; note = 2'-O-methylcytidine-3'-phosphate
  modified_base 19: mod_base = OTHER; note = 2'-O-methyluridine-3'-phosphate
  modified_base 20: mod_base = OTHER; note = 2'-O-methylcytidine-3'-phosphate
  modified_base 21: mod_base = OTHER; note = 2'-O-methylcytidine-3'-phosphorothioate
  modified_base 22: mod_base = OTHER; note = 2'-O-methylcytidine-3'-phosphorothioate
  modified_base 23: mod_base = OTHER; note = 2'-O-methyladenosine-3'-phosphate
  misc_feature 1: note = RNA
  misc_feature 2: note = DNA
  misc_feature 3..4: note = RNA
  misc_feature 5: note = DNA
  misc_feature 6: note = RNA
  misc_feature 7: note = DNA
  misc_feature 8..11: note = RNA
  misc_feature 12: note = DNA
  misc_feature 13..23: note = RNA
aaagtataaatgcttgtctccca

SEQ ID NO: 7726 - DNA, 23 bp, synthetic construct
  source 1..23: mol_type = other DNA
  modified_base 1: mod_base = OTHER; note = 2'-O-methyladenosine-3'-phosphorothioate
  modified_base 2: mod_base = OTHER; note = 2'-deoxyadenosine-3'-phosphorothioate
  modified_base 3: mod_base = OTHER; note = 2'-O-methyladenosine-3'-phosphate
  modified_base 4: mod_base = OTHER; note = 2'-O-methyladenosine-3'-phosphate
  modified_base 6: mod_base = OTHER; note = 2'-O-methyluridine-3'-phosphate
  modified_base 8: mod_base = OTHER; note = 2'-O-methyluridine-3'-phosphate
  modified_base 9: mod_base = OTHER; note = 2'-O-methyladenosine-3'-phosphate
  modified_base 10: mod_base = OTHER; note = 2'-O-methyladenosine-3'-phosphate
  modified_base 11: mod_base = OTHER; note = 2'-O-methyladenosine-3'-phosphate
  modified_base 13: mod_base = OTHER; note = 2'-O-methylguanosine-3'-phosphate
  modified_base 14: mod_base = OTHER; note = 2'-fluorocytidine-3'-phosphate
  modified_base 15: mod_base = OTHER; note = 2'-O-methyluridine-3'-phosphate
  modified_base 16: mod_base = OTHER; note = 2'-O-methyluridine-3'-phosphate
  modified_base 17: mod_base = OTHER; note = 2'-O-methylguanosine-3'-phosphate
  modified_base 18: mod_base = OTHER; note = 2'-O-methyluridine-3'-phosphate
  modified_base 19: mod_base = OTHER; note = 2'-O-methylcytidine-3'-phosphate
  modified_base 20: mod_base = OTHER; note = 2'-O-methyluridine-3'-phosphate
  modified_base 21: mod_base = OTHER; note = 2'-O-methylcytidine-3'-phosphorothioate
  modified_base 22: mod_base = OTHER; note = 2'-O-methylcytidine-3'-phosphorothioate
  modified_base 23: mod_base = OTHER; note = 2'-O-methylcytidine-3'-phosphate
  misc_feature 1: note = RNA
  misc_feature 2: note = DNA
  misc_feature 3..4: note = RNA
  misc_feature 5: note = DNA
  misc_feature 6: note = RNA
  misc_feature 7: note = DNA
  misc_feature 8..11: note = RNA
  misc_feature 12: note = DNA
  misc_feature 13..23: note = RNA
aaaagtataaatgcttgtctccc

SEQ ID NO: 7727 - DNA, 23 bp, synthetic construct
  source 1..23: mol_type = other DNA
  modified_base 1: mod_base = OTHER; note = 2'-O-methyladenosine-3'-phosphorothioate
  modified_base 2: mod_base = OTHER; note = 2'-deoxyguanosine-3'-phosphorothioate
  modified_base 3: mod_base = OTHER; note = 2'-O-methyladenosine-3'-phosphate
  modified_base 4: mod_base = OTHER; note = 2'-O-methyladenosine-3'-phosphate
  modified_base 6: mod_base = OTHER; note = 2'-O-methylguanosine-3'-phosphate
  modified_base 8: mod_base = OTHER; note = 2'-O-methyladenosine-3'-phosphate
  modified_base 9: mod_base = OTHER; note = 2'-O-methyluridine-3'-phosphate
  modified_base 10: mod_base = OTHER; note = 2'-O-methyladenosine-3'-phosphate
  modified_base 11: mod_base = OTHER; note = 2'-O-methyladenosine-3'-phosphate
  modified_base 13: mod_base = OTHER; note = 2'-O-methyluridine-3'-phosphate
  modified_base 14: mod_base = OTHER; note = 2'-fluoroguanosine-3'-phosphate
  modified_base 15: mod_base = OTHER; note = 2'-O-methylcytidine-3'-phosphate
  modified_base 16: mod_base = OTHER; note = 2'-O-methyluridine-3'-phosphate
  modified_base 17: mod_base = OTHER; note = 2'-O-methyluridine-3'-phosphate
  modified_base 18: mod_base = OTHER; note = 2'-O-methylguanosine-3'-phosphate
  modified_base 19: mod_base = OTHER; note = 2'-O-methyluridine-3'-phosphate
  modified_base 20: mod_base = OTHER; note = 2'-O-methylcytidine-3'-phosphate
  modified_base 21: mod_base = OTHER; note = 2'-O-methyluridine-3'-phosphorothioate
  modified_base 22: mod_base = OTHER; note = 2'-O-methylcytidine-3'-phosphorothioate
  modified_base 23: mod_base = OTHER; note = 2'-O-methylcytidine-3'-phosphate
  misc_feature 1: note = RNA
  misc_feature 2: note = DNA
  misc_feature 3..4: note = RNA
  misc_feature 5: note = DNA
  misc_feature 6: note = RNA
  misc_feature 7: note = DNA
  misc_feature 8..11: note = RNA
  misc_feature 12: note = DNA
  misc_feature 13..23: note = RNA
agaaagtataaatgcttgtctcc

SEQ ID NO: 7728 - DNA, 23 bp, synthetic construct
  source 1..23: mol_type = other DNA
  modified_base 1: mod_base = OTHER; note = 2'-O-methyladenosine-3'-phosphorothioate
  modified_base 2: mod_base = OTHER; note = 2'-deoxyadenosine-3'-phosphorothioate
  modified_base 3: mod_base = OTHER; note = 2'-O-methyladenosine-3'-phosphate
  modified_base 4: mod_base = OTHER; note = 2'-O-methyladenosine-3'-phosphate
  modified_base 6: mod_base = OTHER; note = 2'-O-methyladenosine-3'-phosphate
  modified_base 8: mod_base = OTHER; note = 2'-O-methyladenosine-3'-phosphate
  modified_base 9: mod_base = OTHER; note = 2'-O-methylguanosine-3'-phosphate
  modified_base 10: mod_base = OTHER; note = 2'-O-methyluridine-3'-phosphate
  modified_base 11: mod_base = OTHER; note = 2'-O-methyladenosine-3'-phosphate
  modified_base 13: mod_base = OTHER; note = 2'-O-methyladenosine-3'-phosphate
  modified_base 14: mod_base = OTHER; note = 2'-fluoroadenosine-3'-phosphate
  modified_base 15: mod_base = OTHER; note = 2'-O-methyladenosine-3'-phosphate
  modified_base 16: mod_base = OTHER; note = 2'-O-methyluridine-3'-phosphate
  modified_base 17: mod_base = OTHER; note = 2'-O-methylguanosine-3'-phosphate
  modified_base 18: mod_base = OTHER; note = 2'-O-methylcytidine-3'-phosphate
  modified_base 19: mod_base = OTHER; note = 2'-O-methyluridine-3'-phosphate
  modified_base 20: mod_base = OTHER; note = 2'-O-methyluridine-3'-phosphate
  modified_base 21: mod_base = OTHER; note = 2'-O-methylguanosine-3'-phosphorothioate
  modified_base 22: mod_base = OTHER; note = 2'-O-methyluridine-3'-phosphorothioate
  modified_base 23: mod_base = OTHER; note = 2'-O-methylcytidine-3'-phosphate
  misc_feature 1: note = RNA
  misc_feature 2: note = DNA
  misc_feature 3..4: note = RNA
  misc_feature 5: note = DNA
  misc_feature 6: note = RNA
  misc_feature 7: note = DNA
  misc_feature 8..11: note = RNA
  misc_feature 12: note = DNA
  misc_feature 13..23: note = RNA
aaaagaaagtataaatgcttgtc

SEQ ID NO: 7729 - DNA, 23 bp, synthetic construct
  source 1..23: mol_type = other DNA
  modified_base 1: mod_base = OTHER; note = 2'-O-methyladenosine-3'-phosphorothioate
  modified_base 2: mod_base = OTHER; note = 2'-fluorocytidine-3'-phosphorothioate
  modified_base 3: mod_base = OTHER; note = 2'-O-methylcytidine-3'-phosphate
  modified_base 4: mod_base = OTHER; note = 2'-O-methylcytidine-3'-phosphate
  modified_base 6: mod_base = OTHER; note = 2'-O-methylcytidine-3'-phosphate
  modified_base 7: mod_base = OTHER; note = Adenosine-glycol nucleic acid (GNA)
  modified_base 8: mod_base = OTHER; note = 2'-O-methylcytidine-3'-phosphate
  modified_base 9: mod_base = OTHER; note = 2'-O-methyladenosine-3'-phosphate
  modified_base 10: mod_base = OTHER; note = 2'-O-methylguanosine-3'-phosphate
  modified_base 11: mod_base = OTHER; note = 2'-O-methylcytidine-3'-phosphate
  modified_base 12: mod_base = OTHER; note = 2'-O-methyluridine-3'-phosphate
  modified_base 13: mod_base = OTHER; note = 2'-O-methylcytidine-3'-phosphate
  modified_base 14: mod_base = OTHER; note = 2'-fluoroadenosine-3'-phosphate
  modified_base 15: mod_base = OTHER; note = 2'-O-methyluridine-3'-phosphate
  modified_base 16: mod_base = OTHER; note = 2'-fluoroguanosine-3'-phosphate
  modified_base 17: mod_base = OTHER; note = 2'-O-methyluridine-3'-phosphate
  modified_base 18: mod_base = OTHER; note = 2'-O-methylcytidine-3'-phosphate
  modified_base 19: mod_base = OTHER; note = 2'-O-methyluridine-3'-phosphate
  modified_base 20: mod_base = OTHER; note = 2'-O-methylguanosine-3'-phosphate
  modified_base 21: mod_base = OTHER; note = 2'-O-methylguanosine-3'-phosphorothioate
  modified_base 22: mod_base = OTHER; note = 2'-O-methylcytidine-3'-phosphorothioate
  modified_base 23: mod_base = OTHER; note = 2'-O-methyluridine-3'-phosphate
  misc_feature 1..4: note = RNA
  misc_feature 5: note = DNA
  misc_feature 6..23: note = RNA
accctcacagctcatgtctggct

SEQ ID NO: 7730 - DNA, 23 bp, synthetic construct
  source 1..23: mol_type = other DNA
  modified_base 1: mod_base = OTHER; note = 2'-O-methyladenosine-3'-phosphorothioate
  modified_base 2: mod_base = OTHER; note = 2'-fluoroguanosine-3'-phosphorothioate
  modified_base 3: mod_base = OTHER; note = 2'-O-methyladenosine-3'-phosphate
  modified_base 4: mod_base = OTHER; note = 2'-O-methylcytidine-3'-phosphate
  modified_base 6: mod_base = OTHER; note = 2'-O-methylcytidine-3'-phosphate
  modified_base 7: mod_base = OTHER; note = Thymidine-glycol nucleic acid (GNA) S-Isomer
  modified_base 8: mod_base = OTHER; note = 2'-O-methylcytidine-3'-phosphate
  modified_base 9: mod_base = OTHER; note = 2'-O-methyladenosine-3'-phosphate
  modified_base 10: mod_base = OTHER; note = 2'-O-methylcytidine-3'-phosphate
  modified_base 11: mod_base = OTHER; note = 2'-O-methyladenosine-3'-phosphate
  modified_base 12: mod_base = OTHER; note = 2'-O-methylguanosine-3'-phosphate
  modified_base 13: mod_base = OTHER; note = 2'-O-methylcytidine-3'-phosphate
  modified_base 14: mod_base = OTHER; note = 2'-fluorouridine-3'-phosphate
  modified_base 15: mod_base = OTHER; note = 2'-O-methylcytidine-3'-phosphate
  modified_base 16: mod_base = OTHER; note = 2'-fluoroadenosine-3'-phosphate
  modified_base 17: mod_base = OTHER; note = 2'-O-methyluridine-3'-phosphate
  modified_base 18: mod_base = OTHER; note = 2'-O-methylguanosine-3'-phosphate
  modified_base 19: mod_base = OTHER; note = 2'-O-methyluridine-3'-phosphate
  modified_base 20: mod_base = OTHER; note = 2'-O-methylcytidine-3'-phosphate
  modified_base 21: mod_base = OTHER; note = 2'-O-methyluridine-3'-phosphorothioate
  modified_base 22: mod_base = OTHER; note = 2'-O-methylguanosine-3'-phosphorothioate
  modified_base 23: mod_base = OTHER; note = 2'-O-methylguanosine-3'-phosphate
  misc_feature 1..4: note = RNA
  misc_feature 5: note = DNA
  misc_feature 6: note = RNA
  misc_feature 7: note = DNA
  misc_feature 8..23: note = RNA
agaccctcacagctcatgtctgg

SEQ ID NO: 7731 - DNA, 23 bp, synthetic construct
  source 1..23: mol_type = other DNA
  modified_base 1: mod_base = OTHER; note = 2'-O-methyladenosine-3'-phosphorothioate
  modified_base 2: mod_base = OTHER; note = 2'-fluoroguanosine-3'-phosphorothioate
  modified_base 3: mod_base = OTHER; note = 2'-O-methylcytidine-3'-phosphate
  modified_base 4: mod_base = OTHER; note = 2'-O-methyluridine-3'-phosphate
  modified_base 6: mod_base = OTHER; note = 2'-O-methylguanosine-3'-phosphate
  modified_base 7: mod_base = OTHER; note = Adenosine-glycol nucleic acid (GNA)
  modified_base 8: mod_base = OTHER; note = 2'-O-methylcytidine-3'-phosphate
  modified_base 9: mod_base = OTHER; note = 2'-O-methylcytidine-3'-phosphate
  modified_base 10: mod_base = OTHER; note = 2'-O-methylcytidine-3'-phosphate
  modified_base 11: mod_base = OTHER; note = 2'-O-methyluridine-3'-phosphate
  modified_base 12: mod_base = OTHER; note = 2'-O-methylcytidine-3'-phosphate
  modified_base 13: mod_base = OTHER; note = 2'-O-methyladenosine-3'-phosphate
  modified_base 14: mod_base = OTHER; note = 2'-fluorocytidine-3'-phosphate
  modified_base 15: mod_base = OTHER; note = 2'-O-methyladenosine-3'-phosphate
  modified_base 16: mod_base = OTHER; note = 2'-fluoroguanosine-3'-phosphate
  modified_base 17: mod_base = OTHER; note = 2'-O-methylcytidine-3'-phosphate
  modified_base 18: mod_base = OTHER; note = 2'-O-methyluridine-3'-phosphate
  modified_base 19: mod_base = OTHER; note = 2'-O-methylcytidine-3'-phosphate
  modified_base 20: mod_base = OTHER; note = 2'-O-methyladenosine-3'-phosphate
  modified_base 21: mod_base = OTHER; note = 2'-O-methyluridine-3'-phosphorothioate
  modified_base 22: mod_base = OTHER; note = 2'-O-methylguanosine-3'-phosphorothioate
  modified_base 23: mod_base = OTHER; note = 2'-O-methyluridine-3'-phosphate
  misc_feature 1..4: note = RNA
  misc_feature 5: note = DNA
  misc_feature 6..23: note = RNA
agcttgaccctcacagctcatgt

SEQ ID NO: 7732 - DNA, 23 bp, synthetic construct
  source 1..23: mol_type = other DNA
  modified_base 1: mod_base = OTHER; note = 2'-O-methyladenosine-3'-phosphorothioate
  modified_base 2: mod_base = OTHER; note = 2'-fluoroguanosine-3'-phosphorothioate
  modified_base 3: mod_base = OTHER; note = 2'-O-methyluridine-3'-phosphate
  modified_base 4: mod_base = OTHER; note = 2'-O-methylguanosine-3'-phosphate
  modified_base 6: mod_base = OTHER; note = 2'-O-methyluridine-3'-phosphate
  modified_base 7: mod_base = OTHER; note = Thymidine-glycol nucleic acid (GNA) S-Isomer
  modified_base 8: mod_base = OTHER; note = 2'-O-methylguanosine-3'-phosphate
  modified_base 9: mod_base = OTHER; note = 2'-O-methyladenosine-3'-phosphate
  modified_base 10: mod_base = OTHER; note = 2'-O-methylcytidine-3'-phosphate
  modified_base 11: mod_base = OTHER; note = 2'-O-methylcytidine-3'-phosphate
  modified_base 12: mod_base = OTHER; note = 2'-O-methylcytidine-3'-phosphate
  modified_base 13: mod_base = OTHER; note = 2'-O-methyluridine-3'-phosphate
  modified_base 14: mod_base = OTHER; note = 2'-fluorocytidine-3'-phosphate
  modified_base 15: mod_base = OTHER; note = 2'-O-methyladenosine-3'-phosphate
  modified_base 16: mod_base = OTHER; note = 2'-fluorocytidine-3'-phosphate
  modified_base 17: mod_base = OTHER; note = 2'-O-methyladenosine-3'-phosphate
  modified_base 18: mod_base = OTHER; note = 2'-O-methylguanosine-3'-phosphate
  modified_base 19: mod_base = OTHER; note = 2'-O-methylcytidine-3'-phosphate
  modified_base 20: mod_base = OTHER; note = 2'-O-methyluridine-3'-phosphate
  modified_base 21: mod_base = OTHER; note = 2'-O-methylcytidine-3'-phosphorothioate
  modified_base 22: mod_base = OTHER; note = 2'-O-methyladenosine-3'-phosphorothioate
  modified_base 23: mod_base = OTHER; note = 2'-O-methyluridine-3'-phosphate
  misc_feature 1..4: note = RNA
  misc_feature 5: note = DNA
  misc_feature 6: note = RNA
  misc_feature 7: note = DNA
  misc_feature 8..23: note = RNA
agtgcttgaccctcacagctcat

SEQ ID NO: 7733 - DNA, 23 bp, synthetic construct
  source 1..23: mol_type = other DNA
  modified_base 1: mod_base = OTHER; note = 2'-O-methyladenosine-3'-phosphorothioate
  modified_base 2: mod_base = OTHER; note = 2'-fluorouridine -3'-phosphorothioate
  modified_base 3: mod_base = OTHER; note = 2'-O-methylguanosine-3'-phosphate
  modified_base 4: mod_base = OTHER; note = 2'-O-methyluridine-3'-phosphate
  modified_base 6: mod_base = OTHER; note = 2'-O-methylcytidine-3'-phosphate
  modified_base 7: mod_base = OTHER; note = Thymidine-glycol nucleic acid (GNA) S-Isomer
  modified_base 8: mod_base = OTHER; note = 2'-O-methyluridine-3'-phosphate
  modified_base 9: mod_base = OTHER; note = 2'-O-methylguanosine-3'-phosphate
  modified_base 10: mod_base = OTHER; note = 2'-O-methyladenosine-3'-phosphate
  modified_base 11: mod_base = OTHER; note = 2'-O-methylcytidine-3'-phosphate
  modified_base 12: mod_base = OTHER; note = 2'-O-methylcytidine-3'-phosphate
  modified_base 13: mod_base = OTHER; note = 2'-O-methylcytidine-3'-phosphate
  modified_base 14: mod_base = OTHER; note = 2'-fluorouridine-3'-phosphate
  modified_base 15: mod_base = OTHER; note = 2'-O-methylcytidine-3'-phosphate
  modified_base 16: mod_base = OTHER; note = 2'-fluoroadenosine-3'-phosphate
  modified_base 17: mod_base = OTHER; note = 2'-O-methylcytidine-3'-phosphate
  modified_base 18: mod_base = OTHER; note = 2'-O-methyladenosine-3'-phosphate
  modified_base 19: mod_base = OTHER; note = 2'-O-methylguanosine-3'-phosphate
  modified_base 20: mod_base = OTHER; note = 2'-O-methylcytidine-3'-phosphate
  modified_base 21: mod_base = OTHER; note = 2'-O-methyluridine-3'-phosphorothioate
  modified_base 22: mod_base = OTHER; note = 2'-O-methylcytidine-3'-phosphorothioate
  modified_base 23: mod_base = OTHER; note = 2'-O-methyladenosine-3'-phosphate
  misc_feature 1..4: note = RNA
  misc_feature 5: note = DNA
  misc_feature 6: note = RNA
  misc_feature 7: note = DNA
  misc_feature 8..23: note = RNA
atgtgcttgaccctcacagctca

SEQ ID NO: 7734 - DNA, 23 bp, synthetic construct
  source 1..23: mol_type = other DNA
  modified_base 1: mod_base = OTHER; note = 2'-O-methyladenosine-3'-phosphorothioate
  modified_base 2: mod_base = OTHER; note = 2'-fluoroadenosine-3'-phosphorothioate
  modified_base 3: mod_base = OTHER; note = 2'-O-methylguanosine-3'-phosphate
  modified_base 4: mod_base = OTHER; note = 2'-O-methylcytidine-3'-phosphate
  modified_base 6: mod_base = OTHER; note = 2'-O-methylguanosine-3'-phosphate
  modified_base 7: mod_base = OTHER; note = Thymidine-glycol nucleic acid (GNA) S-Isomer
  modified_base 8: mod_base = OTHER; note = 2'-O-methylguanosine-3'-phosphate
  modified_base 9: mod_base = OTHER; note = 2'-O-methylcytidine-3'-phosphate
  modified_base 10: mod_base = OTHER; note = 2'-O-methyluridine-3'-phosphate
  modified_base 11: mod_base = OTHER; note = 2'-O-methyluridine-3'-phosphate
  modified_base 12: mod_base = OTHER; note = 2'-O-methylguanosine-3'-phosphate
  modified_base 13: mod_base = OTHER; note = 2'-O-methyladenosine-3'-phosphate
  modified_base 14: mod_base = OTHER; note = 2'-fluorocytidine-3'-phosphate
  modified_base 15: mod_base = OTHER; note = 2'-O-methylcytidine-3'-phosphate
  modified_base 16: mod_base = OTHER; note = 2'-fluorocytidine-3'-phosphate
  modified_base 17: mod_base = OTHER; note = 2'-O-methyluridine-3'-phosphate
  modified_base 18: mod_base = OTHER; note = 2'-O-methylcytidine-3'-phosphate
  modified_base 19: mod_base = OTHER; note = 2'-O-methyladenosine-3'-phosphate
  modified_base 20: mod_base = OTHER; note = 2'-O-methylcytidine-3'-phosphate
  modified_base 21: mod_base = OTHER; note = 2'-O-methyladenosine-3'-phosphorothioate
  modified_base 22: mod_base = OTHER; note = 2'-O-methylguanosine-3'-phosphorothioate
  modified_base 23: mod_base = OTHER; note = 2'-O-methylcytidine-3'-phosphate
  misc_feature 1..4: note = RNA
  misc_feature 5: note = DNA
  misc_feature 6: note = RNA
  misc_feature 7: note = DNA
  misc_feature 8..23: note = RNA
aagctgtgcttgaccctcacagc

SEQ ID NO: 7735 - DNA, 23 bp, synthetic construct
  source 1..23: mol_type = other DNA
  modified_base 1: mod_base = OTHER; note = 2'-O-methyladenosine-3'-phosphorothioate
  modified_base 2: mod_base = OTHER; note = 2'-fluoroadenosine-3'-phosphorothioate
  modified_base 3: mod_base = OTHER; note = 2'-O-methyluridine-3'-phosphate
  modified_base 4: mod_base = OTHER; note = 2'-O-methyladenosine-3'-phosphate
  modified_base 6: mod_base = OTHER; note = 2'-O-methylcytidine-3'-phosphate
  modified_base 7: mod_base = OTHER; note = Thymidine-glycol nucleic acid (GNA) S-Isomer
  modified_base 8: mod_base = OTHER; note = 2'-O-methylguanosine-3'-phosphate
  modified_base 9: mod_base = OTHER; note = 2'-O-methyluridine-3'-phosphate
  modified_base 10: mod_base = OTHER; note = 2'-O-methylguanosine-3'-phosphate
  modified_base 11: mod_base = OTHER; note = 2'-O-methylcytidine-3'-phosphate
  modified_base 12: mod_base = OTHER; note = 2'-O-methyluridine-3'-phosphate
  modified_base 13: mod_base = OTHER; note = 2'-O-methyluridine-3'-phosphate
  modified_base 14: mod_base = OTHER; note = 2'-fluoroguanosine-3'-phosphate
  modified_base 15: mod_base = OTHER; note = 2'-O-methyladenosine-3'-phosphate
  modified_base 16: mod_base = OTHER; note = 2'-fluorocytidine-3'-phosphate
  modified_base 17: mod_base = OTHER; note = 2'-O-methylcytidine-3'-phosphate
  modified_base 18: mod_base = OTHER; note = 2'-O-methylcytidine-3'-phosphate
  modified_base 19: mod_base = OTHER; note = 2'-O-methyluridine-3'-phosphate
  modified_base 20: mod_base = OTHER; note = 2'-O-methylcytidine-3'-phosphate
  modified_base 21: mod_base = OTHER; note = 2'-O-methyladenosine-3'-phosphorothioate
  modified_base 22: mod_base = OTHER; note = 2'-O-methylcytidine-3'-phosphorothioate
  modified_base 23: mod_base = OTHER; note = 2'-O-methyladenosine-3'-phosphate
  misc_feature 1..4: note = RNA
  misc_feature 5: note = DNA
  misc_feature 6: note = RNA
  misc_feature 7: note = DNA
  misc_feature 8..23: note = RNA
aatagctgtgcttgaccctcaca

SEQ ID NO: 7736 - DNA, 23 bp, synthetic construct
  source 1..23: mol_type = other DNA
  modified_base 1: mod_base = OTHER; note = 2'-O-methyladenosine-3'-phosphorothioate
  modified_base 2: mod_base = OTHER; note = 2'-fluorouridine -3'-phosphorothioate
  modified_base 3: mod_base = OTHER; note = 2'-O-methylguanosine-3'-phosphate
  modified_base 4: mod_base = OTHER; note = 2'-O-methylguanosine-3'-phosphate
  modified_base 6: mod_base = OTHER; note = 2'-O-methyluridine-3'-phosphate
  modified_base 7: mod_base = OTHER; note = Adenosine-glycol nucleic acid (GNA)
  modified_base 8: mod_base = OTHER; note = 2'-O-methylguanosine-3'-phosphate
  modified_base 9: mod_base = OTHER; note = 2'-O-methylcytidine-3'-phosphate
  modified_base 10: mod_base = OTHER; note = 2'-O-methyluridine-3'-phosphate
  modified_base 11: mod_base = OTHER; note = 2'-O-methylguanosine-3'-phosphate
  modified_base 12: mod_base = OTHER; note = 2'-O-methyluridine-3'-phosphate
  modified_base 13: mod_base = OTHER; note = 2'-O-methylguanosine-3'-phosphate
  modified_base 14: mod_base = OTHER; note = 2'-fluorocytidine-3'-phosphate
  modified_base 15: mod_base = OTHER; note = 2'-O-methyluridine-3'-phosphate
  modified_base 16: mod_base = OTHER; note = 2'-fluorouridine-3'-phosphate
  modified_base 17: mod_base = OTHER; note = 2'-O-methylguanosine-3'-phosphate
  modified_base 18: mod_base = OTHER; note = 2'-O-methyladenosine-3'-phosphate
  modified_base 19: mod_base = OTHER; note = 2'-O-methylcytidine-3'-phosphate
  modified_base 20: mod_base = OTHER; note = 2'-O-methylcytidine-3'-phosphate
  modified_base 21: mod_base = OTHER; note = 2'-O-methylcytidine-3'-phosphorothioate
  modified_base 22: mod_base = OTHER; note = 2'-O-methyluridine-3'-phosphorothioate
  modified_base 23: mod_base = OTHER; note = 2'-O-methylcytidine-3'-phosphate
  misc_feature 1..4: note = RNA
  misc_feature 5: note = DNA
  misc_feature 6..23: note = RNA
atggatagctgtgcttgaccctc

SEQ ID NO: 7737 - DNA, 23 bp, synthetic construct
  source 1..23: mol_type = other DNA
  modified_base 1: mod_base = OTHER; note = 2'-O-methyladenosine-3'-phosphorothioate
  modified_base 2: mod_base = OTHER; note = 2'-fluorouridine -3'-phosphorothioate
  modified_base 3: mod_base = OTHER; note = 2'-O-methylcytidine-3'-phosphate
  modified_base 4: mod_base = OTHER; note = 2'-O-methyluridine-3'-phosphate
  modified_base 6: mod_base = OTHER; note = 2'-O-methyladenosine-3'-phosphate
  modified_base 7: mod_base = OTHER; note = Thymidine-glycol nucleic acid (GNA) S-Isomer
  modified_base 8: mod_base = OTHER; note = 2'-O-methylguanosine-3'-phosphate
  modified_base 9: mod_base = OTHER; note = 2'-O-methylguanosine-3'-phosphate
  modified_base 10: mod_base = OTHER; note = 2'-O-methyladenosine-3'-phosphate
  modified_base 11: mod_base = OTHER; note = 2'-O-methyluridine-3'-phosphate
  modified_base 12: mod_base = OTHER; note = 2'-O-methyladenosine-3'-phosphate
  modified_base 13: mod_base = OTHER; note = 2'-O-methylguanosine-3'-phosphate
  modified_base 14: mod_base = OTHER; note = 2'-fluorocytidine-3'-phosphate
  modified_base 15: mod_base = OTHER; note = 2'-O-methyluridine-3'-phosphate
  modified_base 16: mod_base = OTHER; note = 2'-fluoroguanosine-3'-phosphate
  modified_base 17: mod_base = OTHER; note = 2'-O-methyluridine-3'-phosphate
  modified_base 18: mod_base = OTHER; note = 2'-O-methylguanosine-3'-phosphate
  modified_base 19: mod_base = OTHER; note = 2'-O-methylcytidine-3'-phosphate
  modified_base 20: mod_base = OTHER; note = 2'-O-methyluridine-3'-phosphate
  modified_base 21: mod_base = OTHER; note = 2'-O-methyluridine-3'-phosphorothioate
  modified_base 22: mod_base = OTHER; note = 2'-O-methylguanosine-3'-phosphorothioate
  modified_base 23: mod_base = OTHER; note = 2'-O-methyladenosine-3'-phosphate
  misc_feature 1..4: note = RNA
  misc_feature 5: note = DNA
  misc_feature 6: note = RNA
  misc_feature 7: note = DNA
  misc_feature 8..23: note = RNA
atctgatggatagctgtgcttga

SEQ ID NO: 7738 - DNA, 23 bp, synthetic construct
  source 1..23: mol_type = other DNA
  modified_base 1: mod_base = OTHER; note = 2'-O-methyladenosine-3'-phosphorothioate
  modified_base 2: mod_base = OTHER; note = 2'-fluorouridine -3'-phosphorothioate
  modified_base 3: mod_base = OTHER; note = 2'-O-methylcytidine-3'-phosphate
  modified_base 4: mod_base = OTHER; note = 2'-O-methyladenosine-3'-phosphate
  modified_base 6: mod_base = OTHER; note = 2'-O-methylcytidine-3'-phosphate
  modified_base 7: mod_base = OTHER; note = Thymidine-glycol nucleic acid (GNA) S-Isomer
  modified_base 8: mod_base = OTHER; note = 2'-O-methylguanosine-3'-phosphate
  modified_base 9: mod_base = OTHER; note = 2'-O-methyladenosine-3'-phosphate
  modified_base 10: mod_base = OTHER; note = 2'-O-methyluridine-3'-phosphate
  modified_base 11: mod_base = OTHER; note = 2'-O-methylguanosine-3'-phosphate
  modified_base 12: mod_base = OTHER; note = 2'-O-methylguanosine-3'-phosphate
  modified_base 13: mod_base = OTHER; note = 2'-O-methyladenosine-3'-phosphate
  modified_base 14: mod_base = OTHER; note = 2'-fluorouridine-3'-phosphate
  modified_base 15: mod_base = OTHER; note = 2'-O-methyladenosine-3'-phosphate
  modified_base 16: mod_base = OTHER; note = 2'-fluoroguanosine-3'-phosphate
  modified_base 17: mod_base = OTHER; note = 2'-O-methylcytidine-3'-phosphate
  modified_base 18: mod_base = OTHER; note = 2'-O-methyluridine-3'-phosphate
  modified_base 19: mod_base = OTHER; note = 2'-O-methylguanosine-3'-phosphate
  modified_base 20: mod_base = OTHER; note = 2'-O-methyluridine-3'-phosphate
  modified_base 21: mod_base = OTHER; note = 2'-O-methylguanosine-3'-phosphorothioate
  modified_base 22: mod_base = OTHER; note = 2'-O-methylcytidine-3'-phosphorothioate
  modified_base 23: mod_base = OTHER; note = 2'-O-methyluridine-3'-phosphate
  misc_feature 1..4: note = RNA
  misc_feature 5: note = DNA
  misc_feature 6: note = RNA
  misc_feature 7: note = DNA
  misc_feature 8..23: note = RNA
atcatctgatggatagctgtgct

SEQ ID NO: 7739 - DNA, 23 bp, synthetic construct
  source 1..23: mol_type = other DNA
  modified_base 1: mod_base = OTHER; note = 2'-O-methyladenosine-3'-phosphorothioate
  modified_base 2: mod_base = OTHER; note = 2'-fluoroguanosine-3'-phosphorothioate
  modified_base 3: mod_base = OTHER; note = 2'-O-methyladenosine-3'-phosphate
  modified_base 4: mod_base = OTHER; note = 2'-O-methyluridine-3'-phosphate
  modified_base 6: mod_base = OTHER; note = 2'-O-methyladenosine-3'-phosphate
  modified_base 7: mod_base = OTHER; note = Thymidine-glycol nucleic acid (GNA) S-Isomer
  modified_base 8: mod_base = OTHER; note = 2'-O-methylcytidine-3'-phosphate
  modified_base 9: mod_base = OTHER; note = 2'-O-methyluridine-3'-phosphate
  modified_base 10: mod_base = OTHER; note = 2'-O-methylguanosine-3'-phosphate
  modified_base 11: mod_base = OTHER; note = 2'-O-methyladenosine-3'-phosphate
  modified_base 12: mod_base = OTHER; note = 2'-O-methyluridine-3'-phosphate
  modified_base 13: mod_base = OTHER; note = 2'-O-methylguanosine-3'-phosphate
  modified_base 14: mod_base = OTHER; note = 2'-fluoroguanosine-3'-phosphate
  modified_base 15: mod_base = OTHER; note = 2'-O-methyladenosine-3'-phosphate
  modified_base 16: mod_base = OTHER; note = 2'-fluorouridine-3'-phosphate
  modified_base 17: mod_base = OTHER; note = 2'-O-methyladenosine-3'-phosphate
  modified_base 18: mod_base = OTHER; note = 2'-O-methylguanosine-3'-phosphate
  modified_base 19: mod_base = OTHER; note = 2'-O-methylcytidine-3'-phosphate
  modified_base 20: mod_base = OTHER; note = 2'-O-methyluridine-3'-phosphate
  modified_base 21: mod_base = OTHER; note = 2'-O-methylguanosine-3'-phosphorothioate
  modified_base 22: mod_base = OTHER; note = 2'-O-methyluridine-3'-phosphorothioate
  modified_base 23: mod_base = OTHER; note = 2'-O-methylguanosine-3'-phosphate
  misc_feature 1..4: note = RNA
  misc_feature 5: note = DNA
  misc_feature 6: note = RNA
  misc_feature 7: note = DNA
  misc_feature 8..23: note = RNA
agatcatctgatggatagctgtg

SEQ ID NO: 7740 - DNA, 23 bp, synthetic construct
  source 1..23: mol_type = other DNA
  modified_base 1: mod_base = OTHER; note = 2'-O-methyladenosine-3'-phosphorothioate
  modified_base 2: mod_base = OTHER; note = 2'-fluoroadenosine-3'-phosphorothioate
  modified_base 3: mod_base = OTHER; note = 2'-O-methylguanosine-3'-phosphate
  modified_base 4: mod_base = OTHER; note = 2'-O-methyladenosine-3'-phosphate
  modified_base 6: mod_base = OTHER; note = 2'-O-methylcytidine-3'-phosphate
  modified_base 7: mod_base = OTHER; note = Adenosine-glycol nucleic acid (GNA)
  modified_base 8: mod_base = OTHER; note = 2'-O-methyluridine-3'-phosphate
  modified_base 9: mod_base = OTHER; note = 2'-O-methylcytidine-3'-phosphate
  modified_base 10: mod_base = OTHER; note = 2'-O-methyluridine-3'-phosphate
  modified_base 11: mod_base = OTHER; note = 2'-O-methylguanosine-3'-phosphate
  modified_base 12: mod_base = OTHER; note = 2'-O-methyladenosine-3'-phosphate
  modified_base 13: mod_base = OTHER; note = 2'-O-methyluridine-3'-phosphate
  modified_base 14: mod_base = OTHER; note = 2'-fluoroguanosine-3'-phosphate
  modified_base 15: mod_base = OTHER; note = 2'-O-methylguanosine-3'-phosphate
  modified_base 16: mod_base = OTHER; note = 2'-fluoroadenosine-3'-phosphate
  modified_base 17: mod_base = OTHER; note = 2'-O-methyluridine-3'-phosphate
  modified_base 18: mod_base = OTHER; note = 2'-O-methyladenosine-3'-phosphate
  modified_base 19: mod_base = OTHER; note = 2'-O-methylguanosine-3'-phosphate
  modified_base 20: mod_base = OTHER; note = 2'-O-methylcytidine-3'-phosphate
  modified_base 21: mod_base = OTHER; note = 2'-O-methyluridine-3'-phosphorothioate
  modified_base 22: mod_base = OTHER; note = 2'-O-methylguanosine-3'-phosphorothioate
  modified_base 23: mod_base = OTHER; note = 2'-O-methyluridine-3'-phosphate
  misc_feature 1..4: note = RNA
  misc_feature 5: note = DNA
  misc_feature 6..23: note = RNA
aagatcatctgatggatagctgt

SEQ ID NO: 7741 - DNA, 23 bp, synthetic construct
  source 1..23: mol_type = other DNA
  modified_base 1: mod_base = OTHER; note = 2'-O-methyladenosine-3'-phosphorothioate
  modified_base 2: mod_base = OTHER; note = 2'-fluoroguanosine-3'-phosphorothioate
  modified_base 3: mod_base = OTHER; note = 2'-O-methyluridine-3'-phosphate
  modified_base 4: mod_base = OTHER; note = 2'-O-methyladenosine-3'-phosphate
  modified_base 6: mod_base = OTHER; note = 2'-O-methyladenosine-3'-phosphate
  modified_base 7: mod_base = OTHER; note = Thymidine-glycol nucleic acid (GNA) S-Isomer
  modified_base 8: mod_base = OTHER; note = 2'-O-methylcytidine-3'-phosphate
  modified_base 9: mod_base = OTHER; note = 2'-O-methyladenosine-3'-phosphate
  modified_base 10: mod_base = OTHER; note = 2'-O-methyluridine-3'-phosphate
  modified_base 11: mod_base = OTHER; note = 2'-O-methylcytidine-3'-phosphate
  modified_base 12: mod_base = OTHER; note = 2'-O-methyluridine-3'-phosphate
  modified_base 13: mod_base = OTHER; note = 2'-O-methylguanosine-3'-phosphate
  modified_base 14: mod_base = OTHER; note = 2'-fluoroadenosine-3'-phosphate
  modified_base 15: mod_base = OTHER; note = 2'-O-methyluridine-3'-phosphate
  modified_base 16: mod_base = OTHER; note = 2'-fluoroguanosine-3'-phosphate
  modified_base 17: mod_base = OTHER; note = 2'-O-methylguanosine-3'-phosphate
  modified_base 18: mod_base = OTHER; note = 2'-O-methyladenosine-3'-phosphate
  modified_base 19: mod_base = OTHER; note = 2'-O-methyluridine-3'-phosphate
  modified_base 20: mod_base = OTHER; note = 2'-O-methyladenosine-3'-phosphate
  modified_base 21: mod_base = OTHER; note = 2'-O-methylguanosine-3'-phosphorothioate
  modified_base 22: mod_base = OTHER; note = 2'-O-methylcytidine-3'-phosphorothioate
  modified_base 23: mod_base = OTHER; note = 2'-O-methyluridine-3'-phosphate
  misc_feature 1..4: note = RNA
  misc_feature 5: note = DNA
  misc_feature 6: note = RNA
  misc_feature 7: note = DNA
  misc_feature 8..23: note = RNA
agtagatcatctgatggatagct

SEQ ID NO: 7742 - DNA, 23 bp, synthetic construct
  source 1..23: mol_type = other DNA
  modified_base 1: mod_base = OTHER; note = 2'-O-methyladenosine-3'-phosphorothioate
  modified_base 2: mod_base = OTHER; note = 2'-fluoroadenosine-3'-phosphorothioate
  modified_base 3: mod_base = OTHER; note = 2'-O-methylguanosine-3'-phosphate
  modified_base 4: mod_base = OTHER; note = 2'-O-methyluridine-3'-phosphate
  modified_base 6: mod_base = OTHER; note = 2'-O-methylguanosine-3'-phosphate
  modified_base 7: mod_base = OTHER; note = Adenosine-glycol nucleic acid (GNA)
  modified_base 8: mod_base = OTHER; note = 2'-O-methyluridine-3'-phosphate
  modified_base 9: mod_base = OTHER; note = 2'-O-methylcytidine-3'-phosphate
  modified_base 10: mod_base = OTHER; note = 2'-O-methyladenosine-3'-phosphate
  modified_base 11: mod_base = OTHER; note = 2'-O-methyluridine-3'-phosphate
  modified_base 12: mod_base = OTHER; note = 2'-O-methylcytidine-3'-phosphate
  modified_base 13: mod_base = OTHER; note = 2'-O-methyluridine-3'-phosphate
  modified_base 14: mod_base = OTHER; note = 2'-fluoroguanosine-3'-phosphate
  modified_base 15: mod_base = OTHER; note = 2'-O-methyladenosine-3'-phosphate
  modified_base 16: mod_base = OTHER; note = 2'-fluorouridine-3'-phosphate
  modified_base 17: mod_base = OTHER; note = 2'-O-methylguanosine-3'-phosphate
  modified_base 18: mod_base = OTHER; note = 2'-O-methylguanosine-3'-phosphate
  modified_base 19: mod_base = OTHER; note = 2'-O-methyladenosine-3'-phosphate
  modified_base 20: mod_base = OTHER; note = 2'-O-methyluridine-3'-phosphate
  modified_base 21: mod_base = OTHER; note = 2'-O-methyladenosine-3'-phosphorothioate
  modified_base 22: mod_base = OTHER; note = 2'-O-methylguanosine-3'-phosphorothioate
  modified_base 23: mod_base = OTHER; note = 2'-O-methylcytidine-3'-phosphate
  misc_feature 1..4: note = RNA
  misc_feature 5: note = DNA
  misc_feature 6..23: note = RNA
aagtagatcatctgatggatagc

SEQ ID NO: 7743 - DNA, 23 bp, synthetic construct
  source 1..23: mol_type = other DNA
  modified_base 1: mod_base = OTHER; note = 2'-O-methyladenosine-3'-phosphorothioate
  modified_base 2: mod_base = OTHER; note = 2'-fluoroadenosine-3'-phosphorothioate
  modified_base 3: mod_base = OTHER; note = 2'-O-methyladenosine-3'-phosphate
  modified_base 4: mod_base = OTHER; note = 2'-O-methyladenosine-3'-phosphate
  modified_base 6: mod_base = OTHER; note = 2'-O-methyluridine-3'-phosphate
  modified_base 7: mod_base = OTHER; note = Adenosine-glycol nucleic acid (GNA)
  modified_base 8: mod_base = OTHER; note = 2'-O-methylguanosine-3'-phosphate
  modified_base 9: mod_base = OTHER; note = 2'-O-methyladenosine-3'-phosphate
  modified_base 10: mod_base = OTHER; note = 2'-O-methyluridine-3'-phosphate
  modified_base 11: mod_base = OTHER; note = 2'-O-methylcytidine-3'-phosphate
  modified_base 12: mod_base = OTHER; note = 2'-O-methyladenosine-3'-phosphate
  modified_base 13: mod_base = OTHER; note = 2'-O-methyluridine-3'-phosphate
  modified_base 14: mod_base = OTHER; note = 2'-fluorocytidine-3'-phosphate
  modified_base 15: mod_base = OTHER; note = 2'-O-methyluridine-3'-phosphate
  modified_base 16: mod_base = OTHER; note = 2'-fluoroguanosine-3'-phosphate
  modified_base 17: mod_base = OTHER; note = 2'-O-methyladenosine-3'-phosphate
  modified_base 18: mod_base = OTHER; note = 2'-O-methyluridine-3'-phosphate
  modified_base 19: mod_base = OTHER; note = 2'-O-methylguanosine-3'-phosphate
  modified_base 20: mod_base = OTHER; note = 2'-O-methylguanosine-3'-phosphate
  modified_base 21: mod_base = OTHER; note = 2'-O-methyladenosine-3'-phosphorothioate
  modified_base 22: mod_base = OTHER; note = 2'-O-methyluridine-3'-phosphorothioate
  modified_base 23: mod_base = OTHER; note = 2'-O-methyladenosine-3'-phosphate
  misc_feature 1..4: note = RNA
  misc_feature 5: note = DNA
  misc_feature 6..23: note = RNA
aaaagtagatcatctgatggata

SEQ ID NO: 7744 - DNA, 23 bp, synthetic construct
  source 1..23: mol_type = other DNA
  modified_base 1: mod_base = OTHER; note = 2'-O-methyladenosine-3'-phosphorothioate
  modified_base 2: mod_base = OTHER; note = 2'-fluoroguanosine-3'-phosphorothioate
  modified_base 3: mod_base = OTHER; note = 2'-O-methyladenosine-3'-phosphate
  modified_base 4: mod_base = OTHER; note = 2'-O-methyladenosine-3'-phosphate
  modified_base 6: mod_base = OTHER; note = 2'-O-methylguanosine-3'-phosphate
  modified_base 7: mod_base = OTHER; note = Thymidine-glycol nucleic acid (GNA) S-Isomer
  modified_base 8: mod_base = OTHER; note = 2'-O-methyladenosine-3'-phosphate
  modified_base 9: mod_base = OTHER; note = 2'-O-methylguanosine-3'-phosphate
  modified_base 10: mod_base = OTHER; note = 2'-O-methyladenosine-3'-phosphate
  modified_base 11: mod_base = OTHER; note = 2'-O-methyluridine-3'-phosphate
  modified_base 12: mod_base = OTHER; note = 2'-O-methylcytidine-3'-phosphate
  modified_base 13: mod_base = OTHER; note = 2'-O-methyladenosine-3'-phosphate
  modified_base 14: mod_base = OTHER; note = 2'-fluorouridine-3'-phosphate
  modified_base 15: mod_base = OTHER; note = 2'-O-methylcytidine-3'-phosphate
  modified_base 16: mod_base = OTHER; note = 2'-fluorouridine-3'-phosphate
  modified_base 17: mod_base = OTHER; note = 2'-O-methylguanosine-3'-phosphate
  modified_base 18: mod_base = OTHER; note = 2'-O-methyladenosine-3'-phosphate
  modified_base 19: mod_base = OTHER; note = 2'-O-methyluridine-3'-phosphate
  modified_base 20: mod_base = OTHER; note = 2'-O-methylguanosine-3'-phosphate
  modified_base 21: mod_base = OTHER; note = 2'-O-methylguanosine-3'-phosphorothioate
  modified_base 22: mod_base = OTHER; note = 2'-O-methyladenosine-3'-phosphorothioate
  modified_base 23: mod_base = OTHER; note = 2'-O-methyluridine-3'-phosphate
  misc_feature 1..4: note = RNA
  misc_feature 5: note = DNA
  misc_feature 6: note = RNA
  misc_feature 7: note = DNA
  misc_feature 8..23: note = RNA
agaaagtagatcatctgatggat

SEQ ID NO: 7745 - DNA, 23 bp, synthetic construct
  source 1..23: mol_type = other DNA
  modified_base 1: mod_base = OTHER; note = 2'-O-methyladenosine-3'-phosphorothioate
  modified_base 2: mod_base = OTHER; note = 2'-fluoroguanosine-3'-phosphorothioate
  modified_base 3: mod_base = OTHER; note = 2'-O-methylguanosine-3'-phosphate
  modified_base 4: mod_base = OTHER; note = 2'-O-methylcytidine-3'-phosphate
  modified_base 6: mod_base = OTHER; note = 2'-O-methylguanosine-3'-phosphate
  modified_base 7: mod_base = OTHER; note = Adenosine-glycol nucleic acid (GNA)
  modified_base 8: mod_base = OTHER; note = 2'-O-methyladenosine-3'-phosphate
  modified_base 9: mod_base = OTHER; note = 2'-O-methyladenosine-3'-phosphate
  modified_base 10: mod_base = OTHER; note = 2'-O-methylguanosine-3'-phosphate
  modified_base 11: mod_base = OTHER; note = 2'-O-methyluridine-3'-phosphate
  modified_base 12: mod_base = OTHER; note = 2'-O-methyladenosine-3'-phosphate
  modified_base 13: mod_base = OTHER; note = 2'-O-methylguanosine-3'-phosphate
  modified_base 14: mod_base = OTHER; note = 2'-fluoroadenosine-3'-phosphate
  modified_base 15: mod_base = OTHER; note = 2'-O-methyluridine-3'-phosphate
  modified_base 16: mod_base = OTHER; note = 2'-fluorocytidine-3'-phosphate
  modified_base 17: mod_base = OTHER; note = 2'-O-methyladenosine-3'-phosphate
  modified_base 18: mod_base = OTHER; note = 2'-O-methyluridine-3'-phosphate
  modified_base 19: mod_base = OTHER; note = 2'-O-methylcytidine-3'-phosphate
  modified_base 20: mod_base = OTHER; note = 2'-O-methyluridine-3'-phosphate
  modified_base 21: mod_base = OTHER; note = 2'-O-methylguanosine-3'-phosphorothioate
  modified_base 22: mod_base = OTHER; note = 2'-O-methyladenosine-3'-phosphorothioate
  modified_base 23: mod_base = OTHER; note = 2'-O-methyluridine-3'-phosphate
  misc_feature 1..4: note = RNA
  misc_feature 5: note = DNA
  misc_feature 6..23: note = RNA
aggctgaaagtagatcatctgat

SEQ ID NO: 7746 - DNA, 23 bp, synthetic construct
  source 1..23: mol_type = other DNA
  modified_base 1: mod_base = OTHER; note = 2'-O-methyladenosine-3'-phosphorothioate
  modified_base 2: mod_base = OTHER; note = 2'-fluoroadenosine-3'-phosphorothioate
  modified_base 3: mod_base = OTHER; note = 2'-O-methyladenosine-3'-phosphate
  modified_base 4: mod_base = OTHER; note = 2'-O-methylguanosine-3'-phosphate
  modified_base 6: mod_base = OTHER; note = 2'-O-methylcytidine-3'-phosphate
  modified_base 7: mod_base = OTHER; note = Thymidine-glycol nucleic acid (GNA) S-Isomer
  modified_base 8: mod_base = OTHER; note = 2'-O-methylguanosine-3'-phosphate
  modified_base 9: mod_base = OTHER; note = 2'-O-methyladenosine-3'-phosphate
  modified_base 10: mod_base = OTHER; note = 2'-O-methyladenosine-3'-phosphate
  modified_base 11: mod_base = OTHER; note = 2'-O-methyladenosine-3'-phosphate
  modified_base 12: mod_base = OTHER; note = 2'-O-methylguanosine-3'-phosphate
  modified_base 13: mod_base = OTHER; note = 2'-O-methyluridine-3'-phosphate
  modified_base 14: mod_base = OTHER; note = 2'-fluoroadenosine-3'-phosphate
  modified_base 15: mod_base = OTHER; note = 2'-O-methylguanosine-3'-phosphate
  modified_base 16: mod_base = OTHER; note = 2'-fluoroadenosine-3'-phosphate
  modified_base 17: mod_base = OTHER; note = 2'-O-methyluridine-3'-phosphate
  modified_base 18: mod_base = OTHER; note = 2'-O-methylcytidine-3'-phosphate
  modified_base 19: mod_base = OTHER; note = 2'-O-methyladenosine-3'-phosphate
  modified_base 20: mod_base = OTHER; note = 2'-O-methyluridine-3'-phosphate
  modified_base 21: mod_base = OTHER; note = 2'-O-methylcytidine-3'-phosphorothioate
  modified_base 22: mod_base = OTHER; note = 2'-O-methyluridine-3'-phosphorothioate
  modified_base 23: mod_base = OTHER; note = 2'-O-methylguanosine-3'-phosphate
  misc_feature 1..4: note = RNA
  misc_feature 5: note = DNA
  misc_feature 6: note = RNA
  misc_feature 7: note = DNA
  misc_feature 8..23: note = RNA
aaaggctgaaagtagatcatctg

SEQ ID NO: 7747 - DNA, 23 bp, synthetic construct
  source 1..23: mol_type = other DNA
  modified_base 1: mod_base = OTHER; note = 2'-O-methyladenosine-3'-phosphorothioate
  modified_base 2: mod_base = OTHER; note = 2'-fluorouridine -3'-phosphorothioate
  modified_base 3: mod_base = OTHER; note = 2'-O-methylcytidine-3'-phosphate
  modified_base 4: mod_base = OTHER; note = 2'-O-methyladenosine-3'-phosphate
  modified_base 6: mod_base = OTHER; note = 2'-O-methylguanosine-3'-phosphate
  modified_base 7: mod_base = OTHER; note = Adenosine-glycol nucleic acid (GNA)
  modified_base 8: mod_base = OTHER; note = 2'-O-methyladenosine-3'-phosphate
  modified_base 9: mod_base = OTHER; note = 2'-O-methylguanosine-3'-phosphate
  modified_base 10: mod_base = OTHER; note = 2'-O-methylguanosine-3'-phosphate
  modified_base 11: mod_base = OTHER; note = 2'-O-methylcytidine-3'-phosphate
  modified_base 12: mod_base = OTHER; note = 2'-O-methyluridine-3'-phosphate
  modified_base 13: mod_base = OTHER; note = 2'-O-methylguanosine-3'-phosphate
  modified_base 14: mod_base = OTHER; note = 2'-fluoroadenosine-3'-phosphate
  modified_base 15: mod_base = OTHER; note = 2'-O-methyladenosine-3'-phosphate
  modified_base 16: mod_base = OTHER; note = 2'-fluoroadenosine-3'-phosphate
  modified_base 17: mod_base = OTHER; note = 2'-O-methylguanosine-3'-phosphate
  modified_base 18: mod_base = OTHER; note = 2'-O-methyluridine-3'-phosphate
  modified_base 19: mod_base = OTHER; note = 2'-O-methyladenosine-3'-phosphate
  modified_base 20: mod_base = OTHER; note = 2'-O-methylguanosine-3'-phosphate
  modified_base 21: mod_base = OTHER; note = 2'-O-methyladenosine-3'-phosphorothioate
  modified_base 22: mod_base = OTHER; note = 2'-O-methyluridine-3'-phosphorothioate
  modified_base 23: mod_base = OTHER; note = 2'-O-methylcytidine-3'-phosphate
  misc_feature 1..4: note = RNA
  misc_feature 5: note = DNA
  misc_feature 6..23: note = RNA
atcaggaaggctgaaagtagatc

SEQ ID NO: 7748 - DNA, 23 bp, synthetic construct
  source 1..23: mol_type = other DNA
  modified_base 1: mod_base = OTHER; note = 2'-O-methyladenosine-3'-phosphorothioate
  modified_base 2: mod_base = OTHER; note = 2'-fluoroguanosine-3'-phosphorothioate
  modified_base 3: mod_base = OTHER; note = 2'-O-methyladenosine-3'-phosphate
  modified_base 4: mod_base = OTHER; note = 2'-O-methylcytidine-3'-phosphate
  modified_base 6: mod_base = OTHER; note = 2'-O-methylcytidine-3'-phosphate
  modified_base 7: mod_base = OTHER; note = Adenosine-glycol nucleic acid (GNA)
  modified_base 8: mod_base = OTHER; note = 2'-O-methylguanosine-3'-phosphate
  modified_base 9: mod_base = OTHER; note = 2'-O-methylguanosine-3'-phosphate
  modified_base 10: mod_base = OTHER; note = 2'-O-methyladenosine-3'-phosphate
  modified_base 11: mod_base = OTHER; note = 2'-O-methyladenosine-3'-phosphate
  modified_base 12: mod_base = OTHER; note = 2'-O-methylguanosine-3'-phosphate
  modified_base 13: mod_base = OTHER; note = 2'-O-methylguanosine-3'-phosphate
  modified_base 14: mod_base = OTHER; note = 2'-fluorocytidine-3'-phosphate
  modified_base 15: mod_base = OTHER; note = 2'-O-methyluridine-3'-phosphate
  modified_base 16: mod_base = OTHER; note = 2'-fluoroguanosine-3'-phosphate
  modified_base 17: mod_base = OTHER; note = 2'-O-methyladenosine-3'-phosphate
  modified_base 18: mod_base = OTHER; note = 2'-O-methyladenosine-3'-phosphate
  modified_base 19: mod_base = OTHER; note = 2'-O-methyladenosine-3'-phosphate
  modified_base 20: mod_base = OTHER; note = 2'-O-methylguanosine-3'-phosphate
  modified_base 21: mod_base = OTHER; note = 2'-O-methyluridine-3'-phosphorothioate
  modified_base 22: mod_base = OTHER; note = 2'-O-methyladenosine-3'-phosphorothioate
  modified_base 23: mod_base = OTHER; note = 2'-O-methylguanosine-3'-phosphate
  misc_feature 1..4: note = RNA
  misc_feature 5: note = DNA
  misc_feature 6..23: note = RNA
agactcaggaaggctgaaagtag

SEQ ID NO: 7749 - DNA, 23 bp, synthetic construct
  source 1..23: mol_type = other DNA
  modified_base 1: mod_base = OTHER; note = 2'-O-methyladenosine-3'-phosphorothioate
  modified_base 2: mod_base = OTHER; note = 2'-fluorocytidine-3'-phosphorothioate
  modified_base 3: mod_base = OTHER; note = 2'-O-methyluridine-3'-phosphate
  modified_base 4: mod_base = OTHER; note = 2'-O-methylguanosine-3'-phosphate
  modified_base 6: mod_base = OTHER; note = 2'-O-methylguanosine-3'-phosphate
  modified_base 7: mod_base = OTHER; note = Adenosine-glycol nucleic acid (GNA)
  modified_base 8: mod_base = OTHER; note = 2'-O-methylcytidine-3'-phosphate
  modified_base 9: mod_base = OTHER; note = 2'-O-methyluridine-3'-phosphate
  modified_base 10: mod_base = OTHER; note = 2'-O-methylcytidine-3'-phosphate
  modified_base 11: mod_base = OTHER; note = 2'-O-methyladenosine-3'-phosphate
  modified_base 12: mod_base = OTHER; note = 2'-O-methylguanosine-3'-phosphate
  modified_base 13: mod_base = OTHER; note = 2'-O-methylguanosine-3'-phosphate
  modified_base 14: mod_base = OTHER; note = 2'-fluoroadenosine-3'-phosphate
  modified_base 15: mod_base = OTHER; note = 2'-O-methyladenosine-3'-phosphate
  modified_base 16: mod_base = OTHER; note = 2'-fluoroguanosine-3'-phosphate
  modified_base 17: mod_base = OTHER; note = 2'-O-methylguanosine-3'-phosphate
  modified_base 18: mod_base = OTHER; note = 2'-O-methylcytidine-3'-phosphate
  modified_base 19: mod_base = OTHER; note = 2'-O-methyluridine-3'-phosphate
  modified_base 20: mod_base = OTHER; note = 2'-O-methylguanosine-3'-phosphate
  modified_base 21: mod_base = OTHER; note = 2'-O-methyladenosine-3'-phosphorothioate
  modified_base 22: mod_base = OTHER; note = 2'-O-methyladenosine-3'-phosphorothioate
  modified_base 23: mod_base = OTHER; note = 2'-O-methyladenosine-3'-phosphate
  misc_feature 1..4: note = RNA
  misc_feature 5: note = DNA
  misc_feature 6..23: note = RNA
actgggactcaggaaggctgaaa

SEQ ID NO: 7750 - DNA, 23 bp, synthetic construct
  source 1..23: mol_type = other DNA
  modified_base 1: mod_base = OTHER; note = 2'-O-methyladenosine-3'-phosphorothioate
  modified_base 2: mod_base = OTHER; note = 2'-fluoroadenosine-3'-phosphorothioate
  modified_base 3: mod_base = OTHER; note = 2'-O-methylcytidine-3'-phosphate
  modified_base 4: mod_base = OTHER; note = 2'-O-methyladenosine-3'-phosphate
  modified_base 6: mod_base = OTHER; note = 2'-O-methylcytidine-3'-phosphate
  modified_base 7: mod_base = OTHER; note = Adenosine-glycol nucleic acid (GNA)
  modified_base 8: mod_base = OTHER; note = 2'-O-methylguanosine-3'-phosphate
  modified_base 9: mod_base = OTHER; note = 2'-O-methyladenosine-3'-phosphate
  modified_base 10: mod_base = OTHER; note = 2'-O-methylcytidine-3'-phosphate
  modified_base 11: mod_base = OTHER; note = 2'-O-methyladenosine-3'-phosphate
  modified_base 12: mod_base = OTHER; note = 2'-O-methylcytidine-3'-phosphate
  modified_base 13: mod_base = OTHER; note = 2'-O-methylcytidine-3'-phosphate
  modified_base 14: mod_base = OTHER; note = 2'-fluoroadenosine-3'-phosphate
  modified_base 15: mod_base = OTHER; note = 2'-O-methylcytidine-3'-phosphate
  modified_base 16: mod_base = OTHER; note = 2'-fluorouridine-3'-phosphate
  modified_base 17: mod_base = OTHER; note = 2'-O-methylguanosine-3'-phosphate
  modified_base 18: mod_base = OTHER; note = 2'-O-methylcytidine-3'-phosphate
  modified_base 19: mod_base = OTHER; note = 2'-O-methylcytidine-3'-phosphate
  modified_base 20: mod_base = OTHER; note = 2'-O-methyladenosine-3'-phosphate
  modified_base 21: mod_base = OTHER; note = 2'-O-methylcytidine-3'-phosphorothioate
  modified_base 22: mod_base = OTHER; note = 2'-O-methyladenosine-3'-phosphorothioate
  modified_base 23: mod_base = OTHER; note = 2'-O-methylcytidine-3'-phosphate
  misc_feature 1..4: note = RNA
  misc_feature 5: note = DNA
  misc_feature 6..23: note = RNA
aacagcagacaccactgccacac

SEQ ID NO: 7751 - DNA, 23 bp, synthetic construct
  source 1..23: mol_type = other DNA
  modified_base 1: mod_base = OTHER; note = 2'-O-methyladenosine-3'-phosphorothioate
  modified_base 2: mod_base = OTHER; note = 2'-fluoroguanosine-3'-phosphorothioate
  modified_base 3: mod_base = OTHER; note = 2'-O-methyluridine-3'-phosphate
  modified_base 4: mod_base = OTHER; note = 2'-O-methylguanosine-3'-phosphate
  modified_base 6: mod_base = OTHER; note = 2'-O-methylcytidine-3'-phosphate
  modified_base 7: mod_base = OTHER; note = Adenosine-glycol nucleic acid (GNA)
  modified_base 8: mod_base = OTHER; note = 2'-O-methylguanosine-3'-phosphate
  modified_base 9: mod_base = OTHER; note = 2'-O-methylcytidine-3'-phosphate
  modified_base 10: mod_base = OTHER; note = 2'-O-methyladenosine-3'-phosphate
  modified_base 11: mod_base = OTHER; note = 2'-O-methylguanosine-3'-phosphate
  modified_base 12: mod_base = OTHER; note = 2'-O-methyladenosine-3'-phosphate
  modified_base 13: mod_base = OTHER; note = 2'-O-methylcytidine-3'-phosphate
  modified_base 14: mod_base = OTHER; note = 2'-fluoroadenosine-3'-phosphate
  modified_base 15: mod_base = OTHER; note = 2'-O-methylcytidine-3'-phosphate
  modified_base 16: mod_base = OTHER; note = 2'-fluorocytidine-3'-phosphate
  modified_base 17: mod_base = OTHER; note = 2'-O-methyladenosine-3'-phosphate
  modified_base 18: mod_base = OTHER; note = 2'-O-methylcytidine-3'-phosphate
  modified_base 19: mod_base = OTHER; note = 2'-O-methyluridine-3'-phosphate
  modified_base 20: mod_base = OTHER; note = 2'-O-methylguanosine-3'-phosphate
  modified_base 21: mod_base = OTHER; note = 2'-O-methylcytidine-3'-phosphorothioate
  modified_base 22: mod_base = OTHER; note = 2'-O-methylcytidine-3'-phosphorothioate
  modified_base 23: mod_base = OTHER; note = 2'-O-methyladenosine-3'-phosphate
  misc_feature 1..4: note = RNA
  misc_feature 5: note = DNA
  misc_feature 6..23: note = RNA
agtgacagcagacaccactgcca

SEQ ID NO: 7752 - DNA, 23 bp, synthetic construct
  source 1..23: mol_type = other DNA
  modified_base 1: mod_base = OTHER; note = 2'-O-methyladenosine-3'-phosphorothioate
  modified_base 2: mod_base = OTHER; note = 2'-fluorocytidine-3'-phosphorothioate
  modified_base 3: mod_base = OTHER; note = 2'-O-methyladenosine-3'-phosphate
  modified_base 4: mod_base = OTHER; note = 2'-O-methylguanosine-3'-phosphate
  modified_base 6: mod_base = OTHER; note = 2'-O-methylguanosine-3'-phosphate
  modified_base 7: mod_base = OTHER; note = Adenosine-glycol nucleic acid (GNA)
  modified_base 8: mod_base = OTHER; note = 2'-O-methylcytidine-3'-phosphate
  modified_base 9: mod_base = OTHER; note = 2'-O-methyladenosine-3'-phosphate
  modified_base 10: mod_base = OTHER; note = 2'-O-methylguanosine-3'-phosphate
  modified_base 11: mod_base = OTHER; note = 2'-O-methylcytidine-3'-phosphate
  modified_base 12: mod_base = OTHER; note = 2'-O-methyladenosine-3'-phosphate
  modified_base 13: mod_base = OTHER; note = 2'-O-methylguanosine-3'-phosphate
  modified_base 14: mod_base = OTHER; note = 2'-fluoroadenosine-3'-phosphate
  modified_base 15: mod_base = OTHER; note = 2'-O-methylcytidine-3'-phosphate
  modified_base 16: mod_base = OTHER; note = 2'-fluoroadenosine-3'-phosphate
  modified_base 17: mod_base = OTHER; note = 2'-O-methylcytidine-3'-phosphate
  modified_base 18: mod_base = OTHER; note = 2'-O-methylcytidine-3'-phosphate
  modified_base 19: mod_base = OTHER; note = 2'-O-methyladenosine-3'-phosphate
  modified_base 20: mod_base = OTHER; note = 2'-O-methylcytidine-3'-phosphate
  modified_base 21: mod_base = OTHER; note = 2'-O-methyluridine-3'-phosphorothioate
  modified_base 22: mod_base = OTHER; note = 2'-O-methylguanosine-3'-phosphorothioate
  modified_base 23: mod_base = OTHER; note = 2'-O-methylcytidine-3'-phosphate
  misc_feature 1..4: note = RNA
  misc_feature 5: note = DNA
  misc_feature 6..23: note = RNA
acagtgacagcagacaccactgc

SEQ ID NO: 7753 - DNA, 23 bp, synthetic construct
  source 1..23: mol_type = other DNA
  modified_base 1: mod_base = OTHER; note = 2'-O-methyladenosine-3'-phosphorothioate
  modified_base 2: mod_base = OTHER; note = 2'-fluorocytidine-3'-phosphorothioate
  modified_base 3: mod_base = OTHER; note = 2'-O-methyladenosine-3'-phosphate
  modified_base 4: mod_base = OTHER; note = 2'-O-methylcytidine-3'-phosphate
  modified_base 6: mod_base = OTHER; note = 2'-O-methylguanosine-3'-phosphate
  modified_base 7: mod_base = OTHER; note = Thymidine-glycol nucleic acid (GNA) S-Isomer
  modified_base 8: mod_base = OTHER; note = 2'-O-methylguanosine-3'-phosphate
  modified_base 9: mod_base = OTHER; note = 2'-O-methyladenosine-3'-phosphate
  modified_base 10: mod_base = OTHER; note = 2'-O-methylcytidine-3'-phosphate
  modified_base 11: mod_base = OTHER; note = 2'-O-methyladenosine-3'-phosphate
  modified_base 12: mod_base = OTHER; note = 2'-O-methylguanosine-3'-phosphate
  modified_base 13: mod_base = OTHER; note = 2'-O-methylcytidine-3'-phosphate
  modified_base 14: mod_base = OTHER; note = 2'-fluoroadenosine-3'-phosphate
  modified_base 15: mod_base = OTHER; note = 2'-O-methylguanosine-3'-phosphate
  modified_base 16: mod_base = OTHER; note = 2'-fluoroadenosine-3'-phosphate
  modified_base 17: mod_base = OTHER; note = 2'-O-methylcytidine-3'-phosphate
  modified_base 18: mod_base = OTHER; note = 2'-O-methyladenosine-3'-phosphate
  modified_base 19: mod_base = OTHER; note = 2'-O-methylcytidine-3'-phosphate
  modified_base 20: mod_base = OTHER; note = 2'-O-methylcytidine-3'-phosphate
  modified_base 21: mod_base = OTHER; note = 2'-O-methyladenosine-3'-phosphorothioate
  modified_base 22: mod_base = OTHER; note = 2'-O-methylcytidine-3'-phosphorothioate
  modified_base 23: mod_base = OTHER; note = 2'-O-methyluridine-3'-phosphate
  misc_feature 1..4: note = RNA
  misc_feature 5: note = DNA
  misc_feature 6: note = RNA
  misc_feature 7: note = DNA
  misc_feature 8..23: note = RNA
acacagtgacagcagacaccact

SEQ ID NO: 7754 - DNA, 23 bp, synthetic construct
  source 1..23: mol_type = other DNA
  modified_base 1: mod_base = OTHER; note = 2'-O-methyladenosine-3'-phosphorothioate
  modified_base 2: mod_base = OTHER; note = 2'-fluoroguanosine-3'-phosphorothioate
  modified_base 3: mod_base = OTHER; note = 2'-O-methyluridine-3'-phosphate
  modified_base 4: mod_base = OTHER; note = 2'-O-methyluridine-3'-phosphate
  modified_base 6: mod_base = OTHER; note = 2'-O-methylcytidine-3'-phosphate
  modified_base 7: mod_base = OTHER; note = Thymidine-glycol nucleic acid (GNA) S-Isomer
  modified_base 8: mod_base = OTHER; note = 2'-O-methylcytidine-3'-phosphate
  modified_base 9: mod_base = OTHER; note = 2'-O-methylcytidine-3'-phosphate
  modified_base 10: mod_base = OTHER; note = 2'-O-methylguanosine-3'-phosphate
  modified_base 11: mod_base = OTHER; note = 2'-O-methyluridine-3'-phosphate
  modified_base 12: mod_base = OTHER; note = 2'-O-methylcytidine-3'-phosphate
  modified_base 13: mod_base = OTHER; note = 2'-O-methyluridine-3'-phosphate
  modified_base 14: mod_base = OTHER; note = 2'-fluoroguanosine-3'-phosphate
  modified_base 15: mod_base = OTHER; note = 2'-O-methyluridine-3'-phosphate
  modified_base 16: mod_base = OTHER; note = 2'-fluorouridine-3'-phosphate
  modified_base 17: mod_base = OTHER; note = 2'-O-methylguanosine-3'-phosphate
  modified_base 18: mod_base = OTHER; note = 2'-O-methyladenosine-3'-phosphate
  modified_base 19: mod_base = OTHER; note = 2'-O-methylguanosine-3'-phosphate
  modified_base 20: mod_base = OTHER; note = 2'-O-methyluridine-3'-phosphate
  modified_base 21: mod_base = OTHER; note = 2'-O-methylcytidine-3'-phosphorothioate
  modified_base 22: mod_base = OTHER; note = 2'-O-methyluridine-3'-phosphorothioate
  modified_base 23: mod_base = OTHER; note = 2'-O-methylguanosine-3'-phosphate
  misc_feature 1..4: note = RNA
  misc_feature 5: note = DNA
  misc_feature 6: note = RNA
  misc_feature 7: note = DNA
  misc_feature 8..23: note = RNA
agttgctccgtctgttgagtctg

SEQ ID NO: 7755 - DNA, 23 bp, synthetic construct
  source 1..23: mol_type = other DNA
  modified_base 1: mod_base = OTHER; note = 2'-O-methyladenosine-3'-phosphorothioate
  modified_base 2: mod_base = OTHER; note = 2'-fluoroguanosine-3'-phosphorothioate
  modified_base 3: mod_base = OTHER; note = 2'-O-methylcytidine-3'-phosphate
  modified_base 4: mod_base = OTHER; note = 2'-O-methyladenosine-3'-phosphate
  modified_base 6: mod_base = OTHER; note = 2'-O-methyluridine-3'-phosphate
  modified_base 7: mod_base = OTHER; note = Thymidine-glycol nucleic acid (GNA) S-Isomer
  modified_base 8: mod_base = OTHER; note = 2'-O-methylguanosine-3'-phosphate
  modified_base 9: mod_base = OTHER; note = 2'-O-methylcytidine-3'-phosphate
  modified_base 10: mod_base = OTHER; note = 2'-O-methyluridine-3'-phosphate
  modified_base 11: mod_base = OTHER; note = 2'-O-methylcytidine-3'-phosphate
  modified_base 12: mod_base = OTHER; note = 2'-O-methylcytidine-3'-phosphate
  modified_base 13: mod_base = OTHER; note = 2'-O-methylguanosine-3'-phosphate
  modified_base 14: mod_base = OTHER; note = 2'-fluorouridine-3'-phosphate
  modified_base 15: mod_base = OTHER; note = 2'-O-methylcytidine-3'-phosphate
  modified_base 16: mod_base = OTHER; note = 2'-fluorouridine-3'-phosphate
  modified_base 17: mod_base = OTHER; note = 2'-O-methylguanosine-3'-phosphate
  modified_base 18: mod_base = OTHER; note = 2'-O-methyluridine-3'-phosphate
  modified_base 19: mod_base = OTHER; note = 2'-O-methyluridine-3'-phosphate
  modified_base 20: mod_base = OTHER; note = 2'-O-methylguanosine-3'-phosphate
  modified_base 21: mod_base = OTHER; note = 2'-O-methyladenosine-3'-phosphorothioate
  modified_base 22: mod_base = OTHER; note = 2'-O-methylguanosine-3'-phosphorothioate
  modified_base 23: mod_base = OTHER; note = 2'-O-methyluridine-3'-phosphate
  misc_feature 1..4: note = RNA
  misc_feature 5: note = DNA
  misc_feature 6: note = RNA
  misc_feature 7: note = DNA
  misc_feature 8..23: note = RNA
agcagttgctccgtctgttgagt

SEQ ID NO: 7756 - DNA, 23 bp, synthetic construct
  source 1..23: mol_type = other DNA
  modified_base 1: mod_base = OTHER; note = 2'-O-methyladenosine-3'-phosphorothioate
  modified_base 2: mod_base = OTHER; note = 2'-fluoroguanosine-3'-phosphorothioate
  modified_base 3: mod_base = OTHER; note = 2'-O-methylguanosine-3'-phosphate
  modified_base 4: mod_base = OTHER; note = 2'-O-methylcytidine-3'-phosphate
  modified_base 6: mod_base = OTHER; note = 2'-O-methylguanosine-3'-phosphate
  modified_base 7: mod_base = OTHER; note = Thymidine-glycol nucleic acid (GNA) S-Isomer
  modified_base 8: mod_base = OTHER; note = 2'-O-methyluridine-3'-phosphate
  modified_base 9: mod_base = OTHER; note = 2'-O-methylguanosine-3'-phosphate
  modified_base 10: mod_base = OTHER; note = 2'-O-methylcytidine-3'-phosphate
  modified_base 11: mod_base = OTHER; note = 2'-O-methyluridine-3'-phosphate
  modified_base 12: mod_base = OTHER; note = 2'-O-methylcytidine-3'-phosphate
  modified_base 13: mod_base = OTHER; note = 2'-O-methylcytidine-3'-phosphate
  modified_base 14: mod_base = OTHER; note = 2'-fluoroguanosine-3'-phosphate
  modified_base 15: mod_base = OTHER; note = 2'-O-methyluridine-3'-phosphate
  modified_base 16: mod_base = OTHER; note = 2'-fluorocytidine-3'-phosphate
  modified_base 17: mod_base = OTHER; note = 2'-O-methyluridine-3'-phosphate
  modified_base 18: mod_base = OTHER; note = 2'-O-methylguanosine-3'-phosphate
  modified_base 19: mod_base = OTHER; note = 2'-O-methyluridine-3'-phosphate
  modified_base 20: mod_base = OTHER; note = 2'-O-methyluridine-3'-phosphate
  modified_base 21: mod_base = OTHER; note = 2'-O-methylguanosine-3'-phosphorothioate
  modified_base 22: mod_base = OTHER; note = 2'-O-methyladenosine-3'-phosphorothioate
  modified_base 23: mod_base = OTHER; note = 2'-O-methylguanosine-3'-phosphate
  misc_feature 1..4: note = RNA
  misc_feature 5: note = DNA
  misc_feature 6: note = RNA
  misc_feature 7: note = DNA
  misc_feature 8..23: note = RNA
aggcagttgctccgtctgttgag

SEQ ID NO: 7757 - DNA, 23 bp, synthetic construct
  source 1..23: mol_type = other DNA
  modified_base 1: mod_base = OTHER; note = 2'-O-methyladenosine-3'-phosphorothioate
  modified_base 2: mod_base = OTHER; note = 2'-fluoroadenosine-3'-phosphorothioate
  modified_base 3: mod_base = OTHER; note = 2'-O-methyluridine-3'-phosphate
  modified_base 4: mod_base = OTHER; note = 2'-O-methylguanosine-3'-phosphate
  modified_base 6: mod_base = OTHER; note = 2'-O-methylcytidine-3'-phosphate
  modified_base 7: mod_base = OTHER; note = Adenosine-glycol nucleic acid (GNA)
  modified_base 8: mod_base = OTHER; note = 2'-O-methylguanosine-3'-phosphate
  modified_base 9: mod_base = OTHER; note = 2'-O-methyluridine-3'-phosphate
  modified_base 10: mod_base = OTHER; note = 2'-O-methyluridine-3'-phosphate
  modified_base 11: mod_base = OTHER; note = 2'-O-methylguanosine-3'-phosphate
  modified_base 12: mod_base = OTHER; note = 2'-O-methylcytidine-3'-phosphate
  modified_base 13: mod_base = OTHER; note = 2'-O-methyluridine-3'-phosphate
  modified_base 14: mod_base = OTHER; note = 2'-fluorocytidine-3'-phosphate
  modified_base 15: mod_base = OTHER; note = 2'-O-methylcytidine-3'-phosphate
  modified_base 16: mod_base = OTHER; note = 2'-fluoroguanosine-3'-phosphate
  modified_base 17: mod_base = OTHER; note = 2'-O-methyluridine-3'-phosphate
  modified_base 18: mod_base = OTHER; note = 2'-O-methylcytidine-3'-phosphate
  modified_base 19: mod_base = OTHER; note = 2'-O-methyluridine-3'-phosphate
  modified_base 20: mod_base = OTHER; note = 2'-O-methylguanosine-3'-phosphate
  modified_base 21: mod_base = OTHER; note = 2'-O-methyluridine-3'-phosphorothioate
  modified_base 22: mod_base = OTHER; note = 2'-O-methyluridine-3'-phosphorothioate
  modified_base 23: mod_base = OTHER; note = 2'-O-methylguanosine-3'-phosphate
  misc_feature 1..4: note = RNA
  misc_feature 5: note = DNA
  misc_feature 6..23: note = RNA
aatggcagttgctccgtctgttg

SEQ ID NO: 7758 - DNA, 23 bp, synthetic construct
  source 1..23: mol_type = other DNA
  modified_base 1: mod_base = OTHER; note = 2'-O-methyladenosine-3'-phosphorothioate
  modified_base 2: mod_base = OTHER; note = 2'-fluorouridine -3'-phosphorothioate
  modified_base 3: mod_base = OTHER; note = 2'-O-methylcytidine-3'-phosphate
  modified_base 4: mod_base = OTHER; note = 2'-O-methylguanosine-3'-phosphate
  modified_base 6: mod_base = OTHER; note = 2'-O-methyladenosine-3'-phosphate
  modified_base 7: mod_base = OTHER; note = Thymidine-glycol nucleic acid (GNA) S-Isomer
  modified_base 8: mod_base = OTHER; note = 2'-O-methylguanosine-3'-phosphate
  modified_base 9: mod_base = OTHER; note = 2'-O-methylguanosine-3'-phosphate
  modified_base 10: mod_base = OTHER; note = 2'-O-methylcytidine-3'-phosphate
  modified_base 11: mod_base = OTHER; note = 2'-O-methyladenosine-3'-phosphate
  modified_base 12: mod_base = OTHER; note = 2'-O-methylguanosine-3'-phosphate
  modified_base 13: mod_base = OTHER; note = 2'-O-methyluridine-3'-phosphate
  modified_base 14: mod_base = OTHER; note = 2'-fluorouridine-3'-phosphate
  modified_base 15: mod_base = OTHER; note = 2'-O-methylguanosine-3'-phosphate
  modified_base 16: mod_base = OTHER; note = 2'-fluorocytidine-3'-phosphate
  modified_base 17: mod_base = OTHER; note = 2'-O-methyluridine-3'-phosphate
  modified_base 18: mod_base = OTHER; note = 2'-O-methylcytidine-3'-phosphate
  modified_base 19: mod_base = OTHER; note = 2'-O-methylcytidine-3'-phosphate
  modified_base 20: mod_base = OTHER; note = 2'-O-methylguanosine-3'-phosphate
  modified_base 21: mod_base = OTHER; note = 2'-O-methyluridine-3'-phosphorothioate
  modified_base 22: mod_base = OTHER; note = 2'-O-methylcytidine-3'-phosphorothioate
  modified_base 23: mod_base = OTHER; note = 2'-O-methyluridine-3'-phosphate
  misc_feature 1..4: note = RNA
  misc_feature 5: note = DNA
  misc_feature 6: note = RNA
  misc_feature 7: note = DNA
  misc_feature 8..23: note = RNA
atcggatggcagttgctccgtct

SEQ ID NO: 7759 - DNA, 23 bp, synthetic construct
  source 1..23: mol_type = other DNA
  modified_base 1: mod_base = OTHER; note = 2'-O-methyladenosine-3'-phosphorothioate
  modified_base 2: mod_base = OTHER; note = 2'-fluoroguanosine-3'-phosphorothioate
  modified_base 3: mod_base = OTHER; note = 2'-O-methyladenosine-3'-phosphate
  modified_base 4: mod_base = OTHER; note = 2'-O-methylguanosine-3'-phosphate
  modified_base 6: mod_base = OTHER; note = 2'-O-methylcytidine-3'-phosphate
  modified_base 7: mod_base = OTHER; note = Thymidine-glycol nucleic acid (GNA) S-Isomer
  modified_base 8: mod_base = OTHER; note = 2'-O-methylcytidine-3'-phosphate
  modified_base 9: mod_base = OTHER; note = 2'-O-methylguanosine-3'-phosphate
  modified_base 10: mod_base = OTHER; note = 2'-O-methylguanosine-3'-phosphate
  modified_base 11: mod_base = OTHER; note = 2'-O-methyladenosine-3'-phosphate
  modified_base 12: mod_base = OTHER; note = 2'-O-methyluridine-3'-phosphate
  modified_base 13: mod_base = OTHER; note = 2'-O-methylguanosine-3'-phosphate
  modified_base 14: mod_base = OTHER; note = 2'-fluoroguanosine-3'-phosphate
  modified_base 15: mod_base = OTHER; note = 2'-O-methylcytidine-3'-phosphate
  modified_base 16: mod_base = OTHER; note = 2'-fluoroadenosine-3'-phosphate
  modified_base 17: mod_base = OTHER; note = 2'-O-methylguanosine-3'-phosphate
  modified_base 18: mod_base = OTHER; note = 2'-O-methyluridine-3'-phosphate
  modified_base 19: mod_base = OTHER; note = 2'-O-methyluridine-3'-phosphate
  modified_base 20: mod_base = OTHER; note = 2'-O-methylguanosine-3'-phosphate
  modified_base 21: mod_base = OTHER; note = 2'-O-methylcytidine-3'-phosphorothioate
  modified_base 22: mod_base = OTHER; note = 2'-O-methyluridine-3'-phosphorothioate
  modified_base 23: mod_base = OTHER; note = 2'-O-methylcytidine-3'-phosphate
  misc_feature 1..4: note = RNA
  misc_feature 5: note = DNA
  misc_feature 6: note = RNA
  misc_feature 7: note = DNA
  misc_feature 8..23: note = RNA
agagcctcggatggcagttgctc

SEQ ID NO: 7760 - DNA, 23 bp, synthetic construct
  source 1..23: mol_type = other DNA
  modified_base 1: mod_base = OTHER; note = 2'-O-methyladenosine-3'-phosphorothioate
  modified_base 2: mod_base = OTHER; note = 2'-fluoroadenosine-3'-phosphorothioate
  modified_base 3: mod_base = OTHER; note = 2'-O-methylcytidine-3'-phosphate
  modified_base 4: mod_base = OTHER; note = 2'-O-methylcytidine-3'-phosphate
  modified_base 6: mod_base = OTHER; note = 2'-O-methylguanosine-3'-phosphate
  modified_base 7: mod_base = OTHER; note = Adenosine-glycol nucleic acid (GNA)
  modified_base 8: mod_base = OTHER; note = 2'-O-methylguanosine-3'-phosphate
  modified_base 9: mod_base = OTHER; note = 2'-O-methylcytidine-3'-phosphate
  modified_base 10: mod_base = OTHER; note = 2'-O-methyluridine-3'-phosphate
  modified_base 11: mod_base = OTHER; note = 2'-O-methylcytidine-3'-phosphate
  modified_base 12: mod_base = OTHER; note = 2'-O-methylguanosine-3'-phosphate
  modified_base 13: mod_base = OTHER; note = 2'-O-methyluridine-3'-phosphate
  modified_base 14: mod_base = OTHER; note = 2'-fluorouridine-3'-phosphate
  modified_base 15: mod_base = OTHER; note = 2'-O-methylcytidine-3'-phosphate
  modified_base 16: mod_base = OTHER; note = 2'-fluorouridine-3'-phosphate
  modified_base 17: mod_base = OTHER; note = 2'-O-methylguanosine-3'-phosphate
  modified_base 18: mod_base = OTHER; note = 2'-O-methylcytidine-3'-phosphate
  modified_base 19: mod_base = OTHER; note = 2'-O-methyluridine-3'-phosphate
  modified_base 20: mod_base = OTHER; note = 2'-O-methyluridine-3'-phosphate
  modified_base 21: mod_base = OTHER; note = 2'-O-methylguanosine-3'-phosphorothioate
  modified_base 22: mod_base = OTHER; note = 2'-O-methylguanosine-3'-phosphorothioate
  modified_base 23: mod_base = OTHER; note = 2'-O-methylguanosine-3'-phosphate
  misc_feature 1..4: note = RNA
  misc_feature 5: note = DNA
  misc_feature 6..23: note = RNA
aaccagagctcgttctgcttggg

SEQ ID NO: 7761 - DNA, 23 bp, synthetic construct
  source 1..23: mol_type = other DNA
  modified_base 1: mod_base = OTHER; note = 2'-O-methyladenosine-3'-phosphorothioate
  modified_base 2: mod_base = OTHER; note = 2'-fluoroguanosine-3'-phosphorothioate
  modified_base 3: mod_base = OTHER; note = 2'-O-methylcytidine-3'-phosphate
  modified_base 4: mod_base = OTHER; note = 2'-O-methyladenosine-3'-phosphate
  modified_base 6: mod_base = OTHER; note = 2'-O-methylcytidine-3'-phosphate
  modified_base 7: mod_base = OTHER; note = Adenosine-glycol nucleic acid (GNA)
  modified_base 8: mod_base = OTHER; note = 2'-O-methylguanosine-3'-phosphate
  modified_base 9: mod_base = OTHER; note = 2'-O-methyladenosine-3'-phosphate
  modified_base 10: mod_base = OTHER; note = 2'-O-methylguanosine-3'-phosphate
  modified_base 11: mod_base = OTHER; note = 2'-O-methylcytidine-3'-phosphate
  modified_base 12: mod_base = OTHER; note = 2'-O-methyluridine-3'-phosphate
  modified_base 13: mod_base = OTHER; note = 2'-O-methylcytidine-3'-phosphate
  modified_base 14: mod_base = OTHER; note = 2'-fluoroguanosine-3'-phosphate
  modified_base 15: mod_base = OTHER; note = 2'-O-methyluridine-3'-phosphate
  modified_base 16: mod_base = OTHER; note = 2'-fluorouridine-3'-phosphate
  modified_base 17: mod_base = OTHER; note = 2'-O-methylcytidine-3'-phosphate
  modified_base 18: mod_base = OTHER; note = 2'-O-methyluridine-3'-phosphate
  modified_base 19: mod_base = OTHER; note = 2'-O-methylguanosine-3'-phosphate
  modified_base 20: mod_base = OTHER; note = 2'-O-methylcytidine-3'-phosphate
  modified_base 21: mod_base = OTHER; note = 2'-O-methyluridine-3'-phosphorothioate
  modified_base 22: mod_base = OTHER; note = 2'-O-methyluridine-3'-phosphorothioate
  modified_base 23: mod_base = OTHER; note = 2'-O-methylguanosine-3'-phosphate
  misc_feature 1..4: note = RNA
  misc_feature 5: note = DNA
  misc_feature 6..23: note = RNA
agcaccagagctcgttctgcttg

SEQ ID NO: 7762 - DNA, 23 bp, synthetic construct
  source 1..23: mol_type = other DNA
  modified_base 1: mod_base = OTHER; note = 2'-O-methyladenosine-3'-phosphorothioate
  modified_base 2: mod_base = OTHER; note = 2'-fluorocytidine-3'-phosphorothioate
  modified_base 3: mod_base = OTHER; note = 2'-O-methylcytidine-3'-phosphate
  modified_base 4: mod_base = OTHER; note = 2'-O-methyladenosine-3'-phosphate
  modified_base 6: mod_base = OTHER; note = 2'-O-methylcytidine-3'-phosphate
  modified_base 7: mod_base = OTHER; note = Adenosine-glycol nucleic acid (GNA)
  modified_base 8: mod_base = OTHER; note = 2'-O-methylcytidine-3'-phosphate
  modified_base 9: mod_base = OTHER; note = 2'-O-methylcytidine-3'-phosphate
  modified_base 10: mod_base = OTHER; note = 2'-O-methyladenosine-3'-phosphate
  modified_base 11: mod_base = OTHER; note = 2'-O-methylguanosine-3'-phosphate
  modified_base 12: mod_base = OTHER; note = 2'-O-methyladenosine-3'-phosphate
  modified_base 13: mod_base = OTHER; note = 2'-O-methylguanosine-3'-phosphate
  modified_base 14: mod_base = OTHER; note = 2'-fluorocytidine-3'-phosphate
  modified_base 15: mod_base = OTHER; note = 2'-O-methyluridine-3'-phosphate
  modified_base 16: mod_base = OTHER; note = 2'-fluorocytidine-3'-phosphate
  modified_base 17: mod_base = OTHER; note = 2'-O-methylguanosine-3'-phosphate
  modified_base 18: mod_base = OTHER; note = 2'-O-methyluridine-3'-phosphate
  modified_base 19: mod_base = OTHER; note = 2'-O-methyluridine-3'-phosphate
  modified_base 20: mod_base = OTHER; note = 2'-O-methylcytidine-3'-phosphate
  modified_base 21: mod_base = OTHER; note = 2'-O-methyluridine-3'-phosphorothioate
  modified_base 22: mod_base = OTHER; note = 2'-O-methylguanosine-3'-phosphorothioate
  modified_base 23: mod_base = OTHER; note = 2'-O-methylcytidine-3'-phosphate
  misc_feature 1..4: note = RNA
  misc_feature 5: note = DNA
  misc_feature 6..23: note = RNA
accagcaccagagctcgttctgc

SEQ ID NO: 7763 - DNA, 23 bp, synthetic construct
  source 1..23: mol_type = other DNA
  modified_base 1: mod_base = OTHER; note = 2'-O-methyladenosine-3'-phosphorothioate
  modified_base 2: mod_base = OTHER; note = 2'-fluoroguanosine-3'-phosphorothioate
  modified_base 3: mod_base = OTHER; note = 2'-O-methylcytidine-3'-phosphate
  modified_base 4: mod_base = OTHER; note = 2'-O-methyluridine-3'-phosphate
  modified_base 6: mod_base = OTHER; note = 2'-O-methylcytidine-3'-phosphate
  modified_base 7: mod_base = OTHER; note = Adenosine-glycol nucleic acid (GNA)
  modified_base 8: mod_base = OTHER; note = 2'-O-methylguanosine-3'-phosphate
  modified_base 9: mod_base = OTHER; note = 2'-O-methylcytidine-3'-phosphate
  modified_base 10: mod_base = OTHER; note = 2'-O-methyladenosine-3'-phosphate
  modified_base 11: mod_base = OTHER; note = 2'-O-methylcytidine-3'-phosphate
  modified_base 12: mod_base = OTHER; note = 2'-O-methylcytidine-3'-phosphate
  modified_base 13: mod_base = OTHER; note = 2'-O-methyladenosine-3'-phosphate
  modified_base 14: mod_base = OTHER; note = 2'-fluoroguanosine-3'-phosphate
  modified_base 15: mod_base = OTHER; note = 2'-O-methyladenosine-3'-phosphate
  modified_base 16: mod_base = OTHER; note = 2'-fluoroguanosine-3'-phosphate
  modified_base 17: mod_base = OTHER; note = 2'-O-methylcytidine-3'-phosphate
  modified_base 18: mod_base = OTHER; note = 2'-O-methyluridine-3'-phosphate
  modified_base 19: mod_base = OTHER; note = 2'-O-methylcytidine-3'-phosphate
  modified_base 20: mod_base = OTHER; note = 2'-O-methylguanosine-3'-phosphate
  modified_base 21: mod_base = OTHER; note = 2'-O-methyluridine-3'-phosphorothioate
  modified_base 22: mod_base = OTHER; note = 2'-O-methyluridine-3'-phosphorothioate
  modified_base 23: mod_base = OTHER; note = 2'-O-methylcytidine-3'-phosphate
  misc_feature 1..4: note = RNA
  misc_feature 5: note = DNA
  misc_feature 6..23: note = RNA
agctccagcaccagagctcgttc

SEQ ID NO: 7764 - DNA, 23 bp, synthetic construct
  source 1..23: mol_type = other DNA
  modified_base 1: mod_base = OTHER; note = 2'-O-methyladenosine-3'-phosphorothioate
  modified_base 2: mod_base = OTHER; note = 2'-fluorouridine -3'-phosphorothioate
  modified_base 3: mod_base = OTHER; note = 2'-O-methylguanosine-3'-phosphate
  modified_base 4: mod_base = OTHER; note = 2'-O-methylguanosine-3'-phosphate
  modified_base 6: mod_base = OTHER; note = 2'-O-methyluridine-3'-phosphate
  modified_base 7: mod_base = OTHER; note = Adenosine-glycol nucleic acid (GNA)
  modified_base 8: mod_base = OTHER; note = 2'-O-methylguanosine-3'-phosphate
  modified_base 9: mod_base = OTHER; note = 2'-O-methylcytidine-3'-phosphate
  modified_base 10: mod_base = OTHER; note = 2'-O-methyluridine-3'-phosphate
  modified_base 11: mod_base = OTHER; note = 2'-O-methylcytidine-3'-phosphate
  modified_base 12: mod_base = OTHER; note = 2'-O-methylcytidine-3'-phosphate
  modified_base 13: mod_base = OTHER; note = 2'-O-methyladenosine-3'-phosphate
  modified_base 14: mod_base = OTHER; note = 2'-fluoroguanosine-3'-phosphate
  modified_base 15: mod_base = OTHER; note = 2'-O-methylcytidine-3'-phosphate
  modified_base 16: mod_base = OTHER; note = 2'-fluoroadenosine-3'-phosphate
  modified_base 17: mod_base = OTHER; note = 2'-O-methylcytidine-3'-phosphate
  modified_base 18: mod_base = OTHER; note = 2'-O-methylcytidine-3'-phosphate
  modified_base 19: mod_base = OTHER; note = 2'-O-methyladenosine-3'-phosphate
  modified_base 20: mod_base = OTHER; note = 2'-O-methylguanosine-3'-phosphate
  modified_base 21: mod_base = OTHER; note = 2'-O-methyladenosine-3'-phosphorothioate
  modified_base 22: mod_base = OTHER; note = 2'-O-methylguanosine-3'-phosphorothioate
  modified_base 23: mod_base = OTHER; note = 2'-O-methylcytidine-3'-phosphate
  misc_feature 1..4: note = RNA
  misc_feature 5: note = DNA
  misc_feature 6..23: note = RNA
atggctagctccagcaccagagc

SEQ ID NO: 7765 - DNA, 23 bp, synthetic construct
  source 1..23: mol_type = other DNA
  modified_base 1: mod_base = OTHER; note = 2'-O-methyladenosine-3'-phosphorothioate
  modified_base 2: mod_base = OTHER; note = 2'-fluorouridine -3'-phosphorothioate
  modified_base 3: mod_base = OTHER; note = 2'-O-methyluridine-3'-phosphate
  modified_base 4: mod_base = OTHER; note = 2'-O-methylguanosine-3'-phosphate
  modified_base 6: mod_base = OTHER; note = 2'-O-methylcytidine-3'-phosphate
  modified_base 7: mod_base = OTHER; note = Thymidine-glycol nucleic acid (GNA) S-Isomer
  modified_base 8: mod_base = OTHER; note = 2'-O-methyladenosine-3'-phosphate
  modified_base 9: mod_base = OTHER; note = 2'-O-methylguanosine-3'-phosphate
  modified_base 10: mod_base = OTHER; note = 2'-O-methylcytidine-3'-phosphate
  modified_base 11: mod_base = OTHER; note = 2'-O-methyluridine-3'-phosphate
  modified_base 12: mod_base = OTHER; note = 2'-O-methylcytidine-3'-phosphate
  modified_base 13: mod_base = OTHER; note = 2'-O-methylcytidine-3'-phosphate
  modified_base 14: mod_base = OTHER; note = 2'-fluoroadenosine-3'-phosphate
  modified_base 15: mod_base = OTHER; note = 2'-O-methylguanosine-3'-phosphate
  modified_base 16: mod_base = OTHER; note = 2'-fluorocytidine-3'-phosphate
  modified_base 17: mod_base = OTHER; note = 2'-O-methyladenosine-3'-phosphate
  modified_base 18: mod_base = OTHER; note = 2'-O-methylcytidine-3'-phosphate
  modified_base 19: mod_base = OTHER; note = 2'-O-methylcytidine-3'-phosphate
  modified_base 20: mod_base = OTHER; note = 2'-O-methyladenosine-3'-phosphate
  modified_base 21: mod_base = OTHER; note = 2'-O-methylguanosine-3'-phosphorothioate
  modified_base 22: mod_base = OTHER; note = 2'-O-methyladenosine-3'-phosphorothioate
  modified_base 23: mod_base = OTHER; note = 2'-O-methylguanosine-3'-phosphate
  misc_feature 1..4: note = RNA
  misc_feature 5: note = DNA
  misc_feature 6: note = RNA
  misc_feature 7: note = DNA
  misc_feature 8..23: note = RNA
attggctagctccagcaccagag

SEQ ID NO: 7766 - DNA, 23 bp, synthetic construct
  source 1..23: mol_type = other DNA
  modified_base 1: mod_base = OTHER; note = 2'-O-methyladenosine-3'-phosphorothioate
  modified_base 2: mod_base = OTHER; note = 2'-fluorocytidine-3'-phosphorothioate
  modified_base 3: mod_base = OTHER; note = 2'-O-methyluridine-3'-phosphate
  modified_base 4: mod_base = OTHER; note = 2'-O-methylguanosine-3'-phosphate
  modified_base 6: mod_base = OTHER; note = 2'-O-methyluridine-3'-phosphate
  modified_base 7: mod_base = OTHER; note = Thymidine-glycol nucleic acid (GNA) S-Isomer
  modified_base 8: mod_base = OTHER; note = 2'-O-methylguanosine-3'-phosphate
  modified_base 9: mod_base = OTHER; note = 2'-O-methylguanosine-3'-phosphate
  modified_base 10: mod_base = OTHER; note = 2'-O-methylcytidine-3'-phosphate
  modified_base 11: mod_base = OTHER; note = 2'-O-methyluridine-3'-phosphate
  modified_base 12: mod_base = OTHER; note = 2'-O-methyladenosine-3'-phosphate
  modified_base 13: mod_base = OTHER; note = 2'-O-methylguanosine-3'-phosphate
  modified_base 14: mod_base = OTHER; note = 2'-fluorocytidine-3'-phosphate
  modified_base 15: mod_base = OTHER; note = 2'-O-methyluridine-3'-phosphate
  modified_base 16: mod_base = OTHER; note = 2'-fluorocytidine-3'-phosphate
  modified_base 17: mod_base = OTHER; note = 2'-O-methylcytidine-3'-phosphate
  modified_base 18: mod_base = OTHER; note = 2'-O-methyladenosine-3'-phosphate
  modified_base 19: mod_base = OTHER; note = 2'-O-methylguanosine-3'-phosphate
  modified_base 20: mod_base = OTHER; note = 2'-O-methylcytidine-3'-phosphate
  modified_base 21: mod_base = OTHER; note = 2'-O-methyladenosine-3'-phosphorothioate
  modified_base 22: mod_base = OTHER; note = 2'-O-methylcytidine-3'-phosphorothioate
  modified_base 23: mod_base = OTHER; note = 2'-O-methylcytidine-3'-phosphate
  misc_feature 1..4: note = RNA
  misc_feature 5: note = DNA
  misc_feature 6: note = RNA
  misc_feature 7: note = DNA
  misc_feature 8..23: note = RNA
actgcttggctagctccagcacc

SEQ ID NO: 7767 - DNA, 23 bp, synthetic construct
  source 1..23: mol_type = other DNA
  modified_base 1: mod_base = OTHER; note = 2'-O-methyladenosine-3'-phosphorothioate
  modified_base 2: mod_base = OTHER; note = 2'-fluorouridine -3'-phosphorothioate
  modified_base 3: mod_base = OTHER; note = 2'-O-methyluridine-3'-phosphate
  modified_base 4: mod_base = OTHER; note = 2'-O-methyluridine-3'-phosphate
  modified_base 6: mod_base = OTHER; note = 2'-O-methylcytidine-3'-phosphate
  modified_base 7: mod_base = OTHER; note = Thymidine-glycol nucleic acid (GNA) S-Isomer
  modified_base 8: mod_base = OTHER; note = 2'-O-methylguanosine-3'-phosphate
  modified_base 9: mod_base = OTHER; note = 2'-O-methylcytidine-3'-phosphate
  modified_base 10: mod_base = OTHER; note = 2'-O-methyluridine-3'-phosphate
  modified_base 11: mod_base = OTHER; note = 2'-O-methyluridine-3'-phosphate
  modified_base 12: mod_base = OTHER; note = 2'-O-methylguanosine-3'-phosphate
  modified_base 13: mod_base = OTHER; note = 2'-O-methylguanosine-3'-phosphate
  modified_base 14: mod_base = OTHER; note = 2'-fluorocytidine-3'-phosphate
  modified_base 15: mod_base = OTHER; note = 2'-O-methyluridine-3'-phosphate
  modified_base 16: mod_base = OTHER; note = 2'-fluoroadenosine-3'-phosphate
  modified_base 17: mod_base = OTHER; note = 2'-O-methylguanosine-3'-phosphate
  modified_base 18: mod_base = OTHER; note = 2'-O-methylcytidine-3'-phosphate
  modified_base 19: mod_base = OTHER; note = 2'-O-methyluridine-3'-phosphate
  modified_base 20: mod_base = OTHER; note = 2'-O-methylcytidine-3'-phosphate
  modified_base 21: mod_base = OTHER; note = 2'-O-methylcytidine-3'-phosphorothioate
  modified_base 22: mod_base = OTHER; note = 2'-O-methyladenosine-3'-phosphorothioate
  modified_base 23: mod_base = OTHER; note = 2'-O-methylguanosine-3'-phosphate
  misc_feature 1..4: note = RNA
  misc_feature 5: note = DNA
  misc_feature 6: note = RNA
  misc_feature 7: note = DNA
  misc_feature 8..23: note = RNA
atttgctgcttggctagctccag

SEQ ID NO: 7768 - DNA, 23 bp, synthetic construct
  source 1..23: mol_type = other DNA
  modified_base 1: mod_base = OTHER; note = 2'-O-methyladenosine-3'-phosphorothioate
  modified_base 2: mod_base = OTHER; note = 2'-fluoroguanosine-3'-phosphorothioate
  modified_base 3: mod_base = OTHER; note = 2'-O-methylguanosine-3'-phosphate
  modified_base 4: mod_base = OTHER; note = 2'-O-methyladenosine-3'-phosphate
  modified_base 6: mod_base = OTHER; note = 2'-O-methyluridine-3'-phosphate
  modified_base 7: mod_base = OTHER; note = Thymidine-glycol nucleic acid (GNA) S-Isomer
  modified_base 8: mod_base = OTHER; note = 2'-O-methylguanosine-3'-phosphate
  modified_base 9: mod_base = OTHER; note = 2'-O-methylcytidine-3'-phosphate
  modified_base 10: mod_base = OTHER; note = 2'-O-methyluridine-3'-phosphate
  modified_base 11: mod_base = OTHER; note = 2'-O-methylguanosine-3'-phosphate
  modified_base 12: mod_base = OTHER; note = 2'-O-methylcytidine-3'-phosphate
  modified_base 13: mod_base = OTHER; note = 2'-O-methyluridine-3'-phosphate
  modified_base 14: mod_base = OTHER; note = 2'-fluorouridine-3'-phosphate
  modified_base 15: mod_base = OTHER; note = 2'-O-methylguanosine-3'-phosphate
  modified_base 16: mod_base = OTHER; note = 2'-fluoroguanosine-3'-phosphate
  modified_base 17: mod_base = OTHER; note = 2'-O-methylcytidine-3'-phosphate
  modified_base 18: mod_base = OTHER; note = 2'-O-methyluridine-3'-phosphate
  modified_base 19: mod_base = OTHER; note = 2'-O-methyladenosine-3'-phosphate
  modified_base 20: mod_base = OTHER; note = 2'-O-methylguanosine-3'-phosphate
  modified_base 21: mod_base = OTHER; note = 2'-O-methylcytidine-3'-phosphorothioate
  modified_base 22: mod_base = OTHER; note = 2'-O-methyluridine-3'-phosphorothioate
  modified_base 23: mod_base = OTHER; note = 2'-O-methylcytidine-3'-phosphate
  misc_feature 1..4: note = RNA
  misc_feature 5: note = DNA
  misc_feature 6: note = RNA
  misc_feature 7: note = DNA
  misc_feature 8..23: note = RNA
aggatttgctgcttggctagctc

SEQ ID NO: 7769 - DNA, 23 bp, synthetic construct
  source 1..23: mol_type = other DNA
  modified_base 1: mod_base = OTHER; note = 2'-O-methyladenosine-3'-phosphorothioate
  modified_base 2: mod_base = OTHER; note = 2'-fluoroadenosine-3'-phosphorothioate
  modified_base 3: mod_base = OTHER; note = 2'-O-methylguanosine-3'-phosphate
  modified_base 4: mod_base = OTHER; note = 2'-O-methylguanosine-3'-phosphate
  modified_base 6: mod_base = OTHER; note = 2'-O-methyluridine-3'-phosphate
  modified_base 7: mod_base = OTHER; note = Thymidine-glycol nucleic acid (GNA) S-Isomer
  modified_base 8: mod_base = OTHER; note = 2'-O-methyluridine-3'-phosphate
  modified_base 9: mod_base = OTHER; note = 2'-O-methylguanosine-3'-phosphate
  modified_base 10: mod_base = OTHER; note = 2'-O-methylcytidine-3'-phosphate
  modified_base 11: mod_base = OTHER; note = 2'-O-methyluridine-3'-phosphate
  modified_base 12: mod_base = OTHER; note = 2'-O-methylguanosine-3'-phosphate
  modified_base 13: mod_base = OTHER; note = 2'-O-methylcytidine-3'-phosphate
  modified_base 14: mod_base = OTHER; note = 2'-fluorouridine-3'-phosphate
  modified_base 15: mod_base = OTHER; note = 2'-O-methyluridine-3'-phosphate
  modified_base 16: mod_base = OTHER; note = 2'-fluoroguanosine-3'-phosphate
  modified_base 17: mod_base = OTHER; note = 2'-O-methylguanosine-3'-phosphate
  modified_base 18: mod_base = OTHER; note = 2'-O-methylcytidine-3'-phosphate
  modified_base 19: mod_base = OTHER; note = 2'-O-methyluridine-3'-phosphate
  modified_base 20: mod_base = OTHER; note = 2'-O-methyladenosine-3'-phosphate
  modified_base 21: mod_base = OTHER; note = 2'-O-methylguanosine-3'-phosphorothioate
  modified_base 22: mod_base = OTHER; note = 2'-O-methylcytidine-3'-phosphorothioate
  modified_base 23: mod_base = OTHER; note = 2'-O-methyluridine-3'-phosphate
  misc_feature 1..4: note = RNA
  misc_feature 5: note = DNA
  misc_feature 6: note = RNA
  misc_feature 7: note = DNA
  misc_feature 8..23: note = RNA
aaggatttgctgcttggctagct

SEQ ID NO: 7770 - DNA, 23 bp, synthetic construct
  source 1..23: mol_type = other DNA
  modified_base 1: mod_base = OTHER; note = 2'-O-methyladenosine-3'-phosphorothioate
  modified_base 2: mod_base = OTHER; note = 2'-fluorouridine -3'-phosphorothioate
  modified_base 3: mod_base = OTHER; note = 2'-O-methyladenosine-3'-phosphate
  modified_base 4: mod_base = OTHER; note = 2'-O-methyluridine-3'-phosphate
  modified_base 6: mod_base = OTHER; note = 2'-O-methylcytidine-3'-phosphate
  modified_base 7: mod_base = OTHER; note = Thymidine-glycol nucleic acid (GNA) S-Isomer
  modified_base 8: mod_base = OTHER; note = 2'-O-methylguanosine-3'-phosphate
  modified_base 9: mod_base = OTHER; note = 2'-O-methylguanosine-3'-phosphate
  modified_base 10: mod_base = OTHER; note = 2'-O-methylguanosine-3'-phosphate
  modified_base 11: mod_base = OTHER; note = 2'-O-methyladenosine-3'-phosphate
  modified_base 12: mod_base = OTHER; note = 2'-O-methylcytidine-3'-phosphate
  modified_base 13: mod_base = OTHER; note = 2'-O-methylguanosine-3'-phosphate
  modified_base 14: mod_base = OTHER; note = 2'-fluoroadenosine-3'-phosphate
  modified_base 15: mod_base = OTHER; note = 2'-O-methylcytidine-3'-phosphate
  modified_base 16: mod_base = OTHER; note = 2'-fluorouridine-3'-phosphate
  modified_base 17: mod_base = OTHER; note = 2'-O-methylguanosine-3'-phosphate
  modified_base 18: mod_base = OTHER; note = 2'-O-methylguanosine-3'-phosphate
  modified_base 19: mod_base = OTHER; note = 2'-O-methyluridine-3'-phosphate
  modified_base 20: mod_base = OTHER; note = 2'-O-methylcytidine-3'-phosphate
  modified_base 21: mod_base = OTHER; note = 2'-O-methyladenosine-3'-phosphorothioate
  modified_base 22: mod_base = OTHER; note = 2'-O-methylguanosine-3'-phosphorothioate
  modified_base 23: mod_base = OTHER; note = 2'-O-methylguanosine-3'-phosphate
  misc_feature 1..4: note = RNA
  misc_feature 5: note = DNA
  misc_feature 6: note = RNA
  misc_feature 7: note = DNA
  misc_feature 8..23: note = RNA
atattctgggacgactggtcagg

SEQ ID NO: 7771 - DNA, 23 bp, synthetic construct
  source 1..23: mol_type = other DNA
  modified_base 1: mod_base = OTHER; note = 2'-O-methyladenosine-3'-phosphorothioate
  modified_base 2: mod_base = OTHER; note = 2'-fluoroguanosine-3'-phosphorothioate
  modified_base 3: mod_base = OTHER; note = 2'-O-methyluridine-3'-phosphate
  modified_base 4: mod_base = OTHER; note = 2'-O-methyluridine-3'-phosphate
  modified_base 6: mod_base = OTHER; note = 2'-O-methyluridine-3'-phosphate
  modified_base 7: mod_base = OTHER; note = Thymidine-glycol nucleic acid (GNA) S-Isomer
  modified_base 8: mod_base = OTHER; note = 2'-O-methylcytidine-3'-phosphate
  modified_base 9: mod_base = OTHER; note = 2'-O-methyluridine-3'-phosphate
  modified_base 10: mod_base = OTHER; note = 2'-O-methylguanosine-3'-phosphate
  modified_base 11: mod_base = OTHER; note = 2'-O-methylguanosine-3'-phosphate
  modified_base 12: mod_base = OTHER; note = 2'-O-methylguanosine-3'-phosphate
  modified_base 13: mod_base = OTHER; note = 2'-O-methyladenosine-3'-phosphate
  modified_base 14: mod_base = OTHER; note = 2'-fluorocytidine-3'-phosphate
  modified_base 15: mod_base = OTHER; note = 2'-O-methylguanosine-3'-phosphate
  modified_base 16: mod_base = OTHER; note = 2'-fluoroadenosine-3'-phosphate
  modified_base 17: mod_base = OTHER; note = 2'-O-methylcytidine-3'-phosphate
  modified_base 18: mod_base = OTHER; note = 2'-O-methyluridine-3'-phosphate
  modified_base 19: mod_base = OTHER; note = 2'-O-methylguanosine-3'-phosphate
  modified_base 20: mod_base = OTHER; note = 2'-O-methylguanosine-3'-phosphate
  modified_base 21: mod_base = OTHER; note = 2'-O-methyluridine-3'-phosphorothioate
  modified_base 22: mod_base = OTHER; note = 2'-O-methylcytidine-3'-phosphorothioate
  modified_base 23: mod_base = OTHER; note = 2'-O-methyladenosine-3'-phosphate
  misc_feature 1..4: note = RNA
  misc_feature 5: note = DNA
  misc_feature 6: note = RNA
  misc_feature 7: note = DNA
  misc_feature 8..23: note = RNA
agttattctgggacgactggtca

SEQ ID NO: 7772 - DNA, 23 bp, synthetic construct
  source 1..23: mol_type = other DNA
  modified_base 1: mod_base = OTHER; note = 2'-O-methyladenosine-3'-phosphorothioate
  modified_base 2: mod_base = OTHER; note = 2'-fluoroguanosine-3'-phosphorothioate
  modified_base 3: mod_base = OTHER; note = 2'-O-methyladenosine-3'-phosphate
  modified_base 4: mod_base = OTHER; note = 2'-O-methylguanosine-3'-phosphate
  modified_base 6: mod_base = OTHER; note = 2'-O-methyluridine-3'-phosphate
  modified_base 7: mod_base = OTHER; note = Adenosine-glycol nucleic acid (GNA)
  modified_base 8: mod_base = OTHER; note = 2'-O-methyluridine-3'-phosphate
  modified_base 9: mod_base = OTHER; note = 2'-O-methyluridine-3'-phosphate
  modified_base 10: mod_base = OTHER; note = 2'-O-methylcytidine-3'-phosphate
  modified_base 11: mod_base = OTHER; note = 2'-O-methyluridine-3'-phosphate
  modified_base 12: mod_base = OTHER; note = 2'-O-methylguanosine-3'-phosphate
  modified_base 13: mod_base = OTHER; note = 2'-O-methylguanosine-3'-phosphate
  modified_base 14: mod_base = OTHER; note = 2'-fluoroguanosine-3'-phosphate
  modified_base 15: mod_base = OTHER; note = 2'-O-methyladenosine-3'-phosphate
  modified_base 16: mod_base = OTHER; note = 2'-fluorocytidine-3'-phosphate
  modified_base 17: mod_base = OTHER; note = 2'-O-methylguanosine-3'-phosphate
  modified_base 18: mod_base = OTHER; note = 2'-O-methyladenosine-3'-phosphate
  modified_base 19: mod_base = OTHER; note = 2'-O-methylcytidine-3'-phosphate
  modified_base 20: mod_base = OTHER; note = 2'-O-methyluridine-3'-phosphate
  modified_base 21: mod_base = OTHER; note = 2'-O-methylguanosine-3'-phosphorothioate
  modified_base 22: mod_base = OTHER; note = 2'-O-methylguanosine-3'-phosphorothioate
  modified_base 23: mod_base = OTHER; note = 2'-O-methyluridine-3'-phosphate
  misc_feature 1..4: note = RNA
  misc_feature 5: note = DNA
  misc_feature 6..23: note = RNA
agagttattctgggacgactggt

SEQ ID NO: 7773 - DNA, 23 bp, synthetic construct
  source 1..23: mol_type = other DNA
  modified_base 1: mod_base = OTHER; note = 2'-O-methyladenosine-3'-phosphorothioate
  modified_base 2: mod_base = OTHER; note = 2'-fluorouridine -3'-phosphorothioate
  modified_base 3: mod_base = OTHER; note = 2'-O-methylguanosine-3'-phosphate
  modified_base 4: mod_base = OTHER; note = 2'-O-methyladenosine-3'-phosphate
  modified_base 6: mod_base = OTHER; note = 2'-O-methyluridine-3'-phosphate
  modified_base 7: mod_base = OTHER; note = Thymidine-glycol nucleic acid (GNA) S-Isomer
  modified_base 8: mod_base = OTHER; note = 2'-O-methyladenosine-3'-phosphate
  modified_base 9: mod_base = OTHER; note = 2'-O-methyluridine-3'-phosphate
  modified_base 10: mod_base = OTHER; note = 2'-O-methyluridine-3'-phosphate
  modified_base 11: mod_base = OTHER; note = 2'-O-methylcytidine-3'-phosphate
  modified_base 12: mod_base = OTHER; note = 2'-O-methyluridine-3'-phosphate
  modified_base 13: mod_base = OTHER; note = 2'-O-methylguanosine-3'-phosphate
  modified_base 14: mod_base = OTHER; note = 2'-fluoroguanosine-3'-phosphate
  modified_base 15: mod_base = OTHER; note = 2'-O-methylguanosine-3'-phosphate
  modified_base 16: mod_base = OTHER; note = 2'-fluoroadenosine-3'-phosphate
  modified_base 17: mod_base = OTHER; note = 2'-O-methylcytidine-3'-phosphate
  modified_base 18: mod_base = OTHER; note = 2'-O-methylguanosine-3'-phosphate
  modified_base 19: mod_base = OTHER; note = 2'-O-methyladenosine-3'-phosphate
  modified_base 20: mod_base = OTHER; note = 2'-O-methylcytidine-3'-phosphate
  modified_base 21: mod_base = OTHER; note = 2'-O-methyluridine-3'-phosphorothioate
  modified_base 22: mod_base = OTHER; note = 2'-O-methylguanosine-3'-phosphorothioate
  modified_base 23: mod_base = OTHER; note = 2'-O-methylguanosine-3'-phosphate
  misc_feature 1..4: note = RNA
  misc_feature 5: note = DNA
  misc_feature 6: note = RNA
  misc_feature 7: note = DNA
  misc_feature 8..23: note = RNA
atgagttattctgggacgactgg

SEQ ID NO: 7774 - DNA, 23 bp, synthetic construct
  source 1..23: mol_type = other DNA
  modified_base 1: mod_base = OTHER; note = 2'-O-methyladenosine-3'-phosphorothioate
  modified_base 2: mod_base = OTHER; note = 2'-fluoroadenosine-3'-phosphorothioate
  modified_base 3: mod_base = OTHER; note = 2'-O-methyluridine-3'-phosphate
  modified_base 4: mod_base = OTHER; note = 2'-O-methylguanosine-3'-phosphate
  modified_base 6: mod_base = OTHER; note = 2'-O-methylguanosine-3'-phosphate
  modified_base 7: mod_base = OTHER; note = Thymidine-glycol nucleic acid (GNA) S-Isomer
  modified_base 8: mod_base = OTHER; note = 2'-O-methyluridine-3'-phosphate
  modified_base 9: mod_base = OTHER; note = 2'-O-methyladenosine-3'-phosphate
  modified_base 10: mod_base = OTHER; note = 2'-O-methyluridine-3'-phosphate
  modified_base 11: mod_base = OTHER; note = 2'-O-methyluridine-3'-phosphate
  modified_base 12: mod_base = OTHER; note = 2'-O-methylcytidine-3'-phosphate
  modified_base 13: mod_base = OTHER; note = 2'-O-methyluridine-3'-phosphate
  modified_base 14: mod_base = OTHER; note = 2'-fluoroguanosine-3'-phosphate
  modified_base 15: mod_base = OTHER; note = 2'-O-methylguanosine-3'-phosphate
  modified_base 16: mod_base = OTHER; note = 2'-fluoroguanosine-3'-phosphate
  modified_base 17: mod_base = OTHER; note = 2'-O-methyladenosine-3'-phosphate
  modified_base 18: mod_base = OTHER; note = 2'-O-methylcytidine-3'-phosphate
  modified_base 19: mod_base = OTHER; note = 2'-O-methylguanosine-3'-phosphate
  modified_base 20: mod_base = OTHER; note = 2'-O-methyladenosine-3'-phosphate
  modified_base 21: mod_base = OTHER; note = 2'-O-methylcytidine-3'-phosphorothioate
  modified_base 22: mod_base = OTHER; note = 2'-O-methyluridine-3'-phosphorothioate
  modified_base 23: mod_base = OTHER; note = 2'-O-methylguanosine-3'-phosphate
  misc_feature 1..4: note = RNA
  misc_feature 5: note = DNA
  misc_feature 6: note = RNA
  misc_feature 7: note = DNA
  misc_feature 8..23: note = RNA
aatgagttattctgggacgactg

SEQ ID NO: 7775 - DNA, 23 bp, synthetic construct
  source 1..23: mol_type = other DNA
  modified_base 1: mod_base = OTHER; note = 2'-O-methyladenosine-3'-phosphorothioate
  modified_base 2: mod_base = OTHER; note = 2'-fluoroguanosine-3'-phosphorothioate
  modified_base 3: mod_base = OTHER; note = 2'-O-methylguanosine-3'-phosphate
  modified_base 4: mod_base = OTHER; note = 2'-O-methyladenosine-3'-phosphate
  modified_base 6: mod_base = OTHER; note = 2'-O-methylguanosine-3'-phosphate
  modified_base 7: mod_base = OTHER; note = Adenosine-glycol nucleic acid (GNA)
  modified_base 8: mod_base = OTHER; note = 2'-O-methylguanosine-3'-phosphate
  modified_base 9: mod_base = OTHER; note = 2'-O-methyluridine-3'-phosphate
  modified_base 10: mod_base = OTHER; note = 2'-O-methyluridine-3'-phosphate
  modified_base 11: mod_base = OTHER; note = 2'-O-methyladenosine-3'-phosphate
  modified_base 12: mod_base = OTHER; note = 2'-O-methyluridine-3'-phosphate
  modified_base 13: mod_base = OTHER; note = 2'-O-methyluridine-3'-phosphate
  modified_base 14: mod_base = OTHER; note = 2'-fluorocytidine-3'-phosphate
  modified_base 15: mod_base = OTHER; note = 2'-O-methyluridine-3'-phosphate
  modified_base 16: mod_base = OTHER; note = 2'-fluoroguanosine-3'-phosphate
  modified_base 17: mod_base = OTHER; note = 2'-O-methylguanosine-3'-phosphate
  modified_base 18: mod_base = OTHER; note = 2'-O-methylguanosine-3'-phosphate
  modified_base 19: mod_base = OTHER; note = 2'-O-methyladenosine-3'-phosphate
  modified_base 20: mod_base = OTHER; note = 2'-O-methylcytidine-3'-phosphate
  modified_base 21: mod_base = OTHER; note = 2'-O-methylguanosine-3'-phosphorothioate
  modified_base 22: mod_base = OTHER; note = 2'-O-methyladenosine-3'-phosphorothioate
  modified_base 23: mod_base = OTHER; note = 2'-O-methylcytidine-3'-phosphate
  misc_feature 1..4: note = RNA
  misc_feature 5: note = DNA
  misc_feature 6..23: note = RNA
aggatgagttattctgggacgac

SEQ ID NO: 7776 - DNA, 23 bp, synthetic construct
  source 1..23: mol_type = other DNA
  modified_base 1: mod_base = OTHER; note = 2'-O-methyladenosine-3'-phosphorothioate
  modified_base 2: mod_base = OTHER; note = 2'-fluoroguanosine-3'-phosphorothioate
  modified_base 3: mod_base = OTHER; note = 2'-O-methyladenosine-3'-phosphate
  modified_base 4: mod_base = OTHER; note = 2'-O-methylguanosine-3'-phosphate
  modified_base 6: mod_base = OTHER; note = 2'-O-methyladenosine-3'-phosphate
  modified_base 7: mod_base = OTHER; note = Thymidine-glycol nucleic acid (GNA) S-Isomer
  modified_base 8: mod_base = OTHER; note = 2'-O-methylguanosine-3'-phosphate
  modified_base 9: mod_base = OTHER; note = 2'-O-methyladenosine-3'-phosphate
  modified_base 10: mod_base = OTHER; note = 2'-O-methylguanosine-3'-phosphate
  modified_base 11: mod_base = OTHER; note = 2'-O-methyluridine-3'-phosphate
  modified_base 12: mod_base = OTHER; note = 2'-O-methyluridine-3'-phosphate
  modified_base 13: mod_base = OTHER; note = 2'-O-methyladenosine-3'-phosphate
  modified_base 14: mod_base = OTHER; note = 2'-fluorouridine-3'-phosphate
  modified_base 15: mod_base = OTHER; note = 2'-O-methyluridine-3'-phosphate
  modified_base 16: mod_base = OTHER; note = 2'-fluorocytidine-3'-phosphate
  modified_base 17: mod_base = OTHER; note = 2'-O-methyluridine-3'-phosphate
  modified_base 18: mod_base = OTHER; note = 2'-O-methylguanosine-3'-phosphate
  modified_base 19: mod_base = OTHER; note = 2'-O-methylguanosine-3'-phosphate
  modified_base 20: mod_base = OTHER; note = 2'-O-methylguanosine-3'-phosphate
  modified_base 21: mod_base = OTHER; note = 2'-O-methyladenosine-3'-phosphorothioate
  modified_base 22: mod_base = OTHER; note = 2'-O-methylcytidine-3'-phosphorothioate
  modified_base 23: mod_base = OTHER; note = 2'-O-methylguanosine-3'-phosphate
  misc_feature 1..4: note = RNA
  misc_feature 5: note = DNA
  misc_feature 6: note = RNA
  misc_feature 7: note = DNA
  misc_feature 8..23: note = RNA
agaggatgagttattctgggacg

SEQ ID NO: 7777 - DNA, 23 bp, synthetic construct
  source 1..23: mol_type = other DNA
  modified_base 1: mod_base = OTHER; note = 2'-O-methyladenosine-3'-phosphorothioate
  modified_base 2: mod_base = OTHER; note = 2'-fluoroguanosine-3'-phosphorothioate
  modified_base 3: mod_base = OTHER; note = 2'-O-methylguanosine-3'-phosphate
  modified_base 4: mod_base = OTHER; note = 2'-O-methyladenosine-3'-phosphate
  modified_base 6: mod_base = OTHER; note = 2'-O-methylguanosine-3'-phosphate
  modified_base 7: mod_base = OTHER; note = Adenosine-glycol nucleic acid (GNA)
  modified_base 8: mod_base = OTHER; note = 2'-O-methyluridine-3'-phosphate
  modified_base 9: mod_base = OTHER; note = 2'-O-methylguanosine-3'-phosphate
  modified_base 10: mod_base = OTHER; note = 2'-O-methyladenosine-3'-phosphate
  modified_base 11: mod_base = OTHER; note = 2'-O-methylguanosine-3'-phosphate
  modified_base 12: mod_base = OTHER; note = 2'-O-methyluridine-3'-phosphate
  modified_base 13: mod_base = OTHER; note = 2'-O-methyluridine-3'-phosphate
  modified_base 14: mod_base = OTHER; note = 2'-fluoroadenosine-3'-phosphate
  modified_base 15: mod_base = OTHER; note = 2'-O-methyluridine-3'-phosphate
  modified_base 16: mod_base = OTHER; note = 2'-fluorouridine-3'-phosphate
  modified_base 17: mod_base = OTHER; note = 2'-O-methylcytidine-3'-phosphate
  modified_base 18: mod_base = OTHER; note = 2'-O-methyluridine-3'-phosphate
  modified_base 19: mod_base = OTHER; note = 2'-O-methylguanosine-3'-phosphate
  modified_base 20: mod_base = OTHER; note = 2'-O-methylguanosine-3'-phosphate
  modified_base 21: mod_base = OTHER; note = 2'-O-methylguanosine-3'-phosphorothioate
  modified_base 22: mod_base = OTHER; note = 2'-O-methyladenosine-3'-phosphorothioate
  modified_base 23: mod_base = OTHER; note = 2'-O-methylcytidine-3'-phosphate
  misc_feature 1..4: note = RNA
  misc_feature 5: note = DNA
  misc_feature 6..23: note = RNA
aggaggatgagttattctgggac

SEQ ID NO: 7778 - DNA, 23 bp, synthetic construct
  source 1..23: mol_type = other DNA
  modified_base 1: mod_base = OTHER; note = 2'-O-methyladenosine-3'-phosphorothioate
  modified_base 2: mod_base = OTHER; note = 2'-fluorouridine -3'-phosphorothioate
  modified_base 3: mod_base = OTHER; note = 2'-O-methyluridine-3'-phosphate
  modified_base 4: mod_base = OTHER; note = 2'-O-methylcytidine-3'-phosphate
  modified_base 6: mod_base = OTHER; note = 2'-O-methylcytidine-3'-phosphate
  modified_base 7: mod_base = OTHER; note = Thymidine-glycol nucleic acid (GNA) S-Isomer
  modified_base 8: mod_base = OTHER; note = 2'-O-methylguanosine-3'-phosphate
  modified_base 9: mod_base = OTHER; note = 2'-O-methylguanosine-3'-phosphate
  modified_base 10: mod_base = OTHER; note = 2'-O-methyladenosine-3'-phosphate
  modified_base 11: mod_base = OTHER; note = 2'-O-methylguanosine-3'-phosphate
  modified_base 12: mod_base = OTHER; note = 2'-O-methylcytidine-3'-phosphate
  modified_base 13: mod_base = OTHER; note = 2'-O-methylcytidine-3'-phosphate
  modified_base 14: mod_base = OTHER; note = 2'-fluoroadenosine-3'-phosphate
  modified_base 15: mod_base = OTHER; note = 2'-O-methylcytidine-3'-phosphate
  modified_base 16: mod_base = OTHER; note = 2'-fluoroadenosine-3'-phosphate
  modified_base 17: mod_base = OTHER; note = 2'-O-methylcytidine-3'-phosphate
  modified_base 18: mod_base = OTHER; note = 2'-O-methyluridine-3'-phosphate
  modified_base 19: mod_base = OTHER; note = 2'-O-methylcytidine-3'-phosphate
  modified_base 20: mod_base = OTHER; note = 2'-O-methylcytidine-3'-phosphate
  modified_base 21: mod_base = OTHER; note = 2'-O-methylcytidine-3'-phosphorothioate
  modified_base 22: mod_base = OTHER; note = 2'-O-methyluridine-3'-phosphorothioate
  modified_base 23: mod_base = OTHER; note = 2'-O-methylguanosine-3'-phosphate
  misc_feature 1..4: note = RNA
  misc_feature 5: note = DNA
  misc_feature 6: note = RNA
  misc_feature 7: note = DNA
  misc_feature 8..23: note = RNA
attccctggagccacactccctg

SEQ ID NO: 7779 - DNA, 23 bp, synthetic construct
  source 1..23: mol_type = other DNA
  modified_base 1: mod_base = OTHER; note = 2'-O-methyladenosine-3'-phosphorothioate
  modified_base 2: mod_base = OTHER; note = 2'-fluoroguanosine-3'-phosphorothioate
  modified_base 3: mod_base = OTHER; note = 2'-O-methyluridine-3'-phosphate
  modified_base 4: mod_base = OTHER; note = 2'-O-methyladenosine-3'-phosphate
  modified_base 6: mod_base = OTHER; note = 2'-O-methylcytidine-3'-phosphate
  modified_base 7: mod_base = OTHER; note = Adenosine-glycol nucleic acid (GNA)
  modified_base 8: mod_base = OTHER; note = 2'-O-methyladenosine-3'-phosphate
  modified_base 9: mod_base = OTHER; note = 2'-O-methyladenosine-3'-phosphate
  modified_base 10: mod_base = OTHER; note = 2'-O-methylguanosine-3'-phosphate
  modified_base 11: mod_base = OTHER; note = 2'-O-methylcytidine-3'-phosphate
  modified_base 12: mod_base = OTHER; note = 2'-O-methyluridine-3'-phosphate
  modified_base 13: mod_base = OTHER; note = 2'-O-methylguanosine-3'-phosphate
  modified_base 14: mod_base = OTHER; note = 2'-fluoroadenosine-3'-phosphate
  modified_base 15: mod_base = OTHER; note = 2'-O-methyluridine-3'-phosphate
  modified_base 16: mod_base = OTHER; note = 2'-fluoroguanosine-3'-phosphate
  modified_base 17: mod_base = OTHER; note = 2'-O-methyladenosine-3'-phosphate
  modified_base 18: mod_base = OTHER; note = 2'-O-methylcytidine-3'-phosphate
  modified_base 19: mod_base = OTHER; note = 2'-O-methylcytidine-3'-phosphate
  modified_base 20: mod_base = OTHER; note = 2'-O-methyluridine-3'-phosphate
  modified_base 21: mod_base = OTHER; note = 2'-O-methylcytidine-3'-phosphorothioate
  modified_base 22: mod_base = OTHER; note = 2'-O-methylcytidine-3'-phosphorothioate
  modified_base 23: mod_base = OTHER; note = 2'-O-methyluridine-3'-phosphate
  misc_feature 1..4: note = RNA
  misc_feature 5: note = DNA
  misc_feature 6..23: note = RNA
agtagcaaagctgatgacctcct

SEQ ID NO: 7780 - DNA, 23 bp, synthetic construct
  source 1..23: mol_type = other DNA
  modified_base 1: mod_base = OTHER; note = 2'-O-methyladenosine-3'-phosphorothioate
  modified_base 2: mod_base = OTHER; note = 2'-fluoroadenosine-3'-phosphorothioate
  modified_base 3: mod_base = OTHER; note = 2'-O-methylcytidine-3'-phosphate
  modified_base 4: mod_base = OTHER; note = 2'-O-methyladenosine-3'-phosphate
  modified_base 6: mod_base = OTHER; note = 2'-O-methyluridine-3'-phosphate
  modified_base 7: mod_base = OTHER; note = Adenosine-glycol nucleic acid (GNA)
  modified_base 8: mod_base = OTHER; note = 2'-O-methylguanosine-3'-phosphate
  modified_base 9: mod_base = OTHER; note = 2'-O-methylcytidine-3'-phosphate
  modified_base 10: mod_base = OTHER; note = 2'-O-methyladenosine-3'-phosphate
  modified_base 11: mod_base = OTHER; note = 2'-O-methyladenosine-3'-phosphate
  modified_base 12: mod_base = OTHER; note = 2'-O-methyladenosine-3'-phosphate
  modified_base 13: mod_base = OTHER; note = 2'-O-methylguanosine-3'-phosphate
  modified_base 14: mod_base = OTHER; note = 2'-fluorocytidine-3'-phosphate
  modified_base 15: mod_base = OTHER; note = 2'-O-methyluridine-3'-phosphate
  modified_base 16: mod_base = OTHER; note = 2'-fluoroguanosine-3'-phosphate
  modified_base 17: mod_base = OTHER; note = 2'-O-methyladenosine-3'-phosphate
  modified_base 18: mod_base = OTHER; note = 2'-O-methyluridine-3'-phosphate
  modified_base 19: mod_base = OTHER; note = 2'-O-methylguanosine-3'-phosphate
  modified_base 20: mod_base = OTHER; note = 2'-O-methyladenosine-3'-phosphate
  modified_base 21: mod_base = OTHER; note = 2'-O-methylcytidine-3'-phosphorothioate
  modified_base 22: mod_base = OTHER; note = 2'-O-methylcytidine-3'-phosphorothioate
  modified_base 23: mod_base = OTHER; note = 2'-O-methyluridine-3'-phosphate
  misc_feature 1..4: note = RNA
  misc_feature 5: note = DNA
  misc_feature 6..23: note = RNA
aacagtagcaaagctgatgacct

SEQ ID NO: 7781 - DNA, 23 bp, synthetic construct
  source 1..23: mol_type = other DNA
  modified_base 1: mod_base = OTHER; note = 2'-O-methyladenosine-3'-phosphorothioate
  modified_base 2: mod_base = OTHER; note = 2'-fluoroguanosine-3'-phosphorothioate
  modified_base 3: mod_base = OTHER; note = 2'-O-methyladenosine-3'-phosphate
  modified_base 4: mod_base = OTHER; note = 2'-O-methylcytidine-3'-phosphate
  modified_base 6: mod_base = OTHER; note = 2'-O-methylguanosine-3'-phosphate
  modified_base 7: mod_base = OTHER; note = Thymidine-glycol nucleic acid (GNA) S-Isomer
  modified_base 8: mod_base = OTHER; note = 2'-O-methyladenosine-3'-phosphate
  modified_base 9: mod_base = OTHER; note = 2'-O-methylguanosine-3'-phosphate
  modified_base 10: mod_base = OTHER; note = 2'-O-methylcytidine-3'-phosphate
  modified_base 11: mod_base = OTHER; note = 2'-O-methyladenosine-3'-phosphate
  modified_base 12: mod_base = OTHER; note = 2'-O-methyladenosine-3'-phosphate
  modified_base 13: mod_base = OTHER; note = 2'-O-methyladenosine-3'-phosphate
  modified_base 14: mod_base = OTHER; note = 2'-fluoroguanosine-3'-phosphate
  modified_base 15: mod_base = OTHER; note = 2'-O-methylcytidine-3'-phosphate
  modified_base 16: mod_base = OTHER; note = 2'-fluorouridine-3'-phosphate
  modified_base 17: mod_base = OTHER; note = 2'-O-methylguanosine-3'-phosphate
  modified_base 18: mod_base = OTHER; note = 2'-O-methyladenosine-3'-phosphate
  modified_base 19: mod_base = OTHER; note = 2'-O-methyluridine-3'-phosphate
  modified_base 20: mod_base = OTHER; note = 2'-O-methylguanosine-3'-phosphate
  modified_base 21: mod_base = OTHER; note = 2'-O-methyladenosine-3'-phosphorothioate
  modified_base 22: mod_base = OTHER; note = 2'-O-methylcytidine-3'-phosphorothioate
  modified_base 23: mod_base = OTHER; note = 2'-O-methylcytidine-3'-phosphate
  misc_feature 1..4: note = RNA
  misc_feature 5: note = DNA
  misc_feature 6: note = RNA
  misc_feature 7: note = DNA
  misc_feature 8..23: note = RNA
agacagtagcaaagctgatgacc

SEQ ID NO: 7782 - DNA, 23 bp, synthetic construct
  source 1..23: mol_type = other DNA
  modified_base 1: mod_base = OTHER; note = 2'-O-methyladenosine-3'-phosphorothioate
  modified_base 2: mod_base = OTHER; note = 2'-fluorocytidine-3'-phosphorothioate
  modified_base 3: mod_base = OTHER; note = 2'-O-methyluridine-3'-phosphate
  modified_base 4: mod_base = OTHER; note = 2'-O-methylguanosine-3'-phosphate
  modified_base 6: mod_base = OTHER; note = 2'-O-methylguanosine-3'-phosphate
  modified_base 7: mod_base = OTHER; note = Adenosine-glycol nucleic acid (GNA)
  modified_base 8: mod_base = OTHER; note = 2'-O-methylcytidine-3'-phosphate
  modified_base 9: mod_base = OTHER; note = 2'-O-methyladenosine-3'-phosphate
  modified_base 10: mod_base = OTHER; note = 2'-O-methylguanosine-3'-phosphate
  modified_base 11: mod_base = OTHER; note = 2'-O-methyluridine-3'-phosphate
  modified_base 12: mod_base = OTHER; note = 2'-O-methyladenosine-3'-phosphate
  modified_base 13: mod_base = OTHER; note = 2'-O-methylguanosine-3'-phosphate
  modified_base 14: mod_base = OTHER; note = 2'-fluorocytidine-3'-phosphate
  modified_base 15: mod_base = OTHER; note = 2'-O-methyladenosine-3'-phosphate
  modified_base 16: mod_base = OTHER; note = 2'-fluoroadenosine-3'-phosphate
  modified_base 17: mod_base = OTHER; note = 2'-O-methyladenosine-3'-phosphate
  modified_base 18: mod_base = OTHER; note = 2'-O-methylguanosine-3'-phosphate
  modified_base 19: mod_base = OTHER; note = 2'-O-methylcytidine-3'-phosphate
  modified_base 20: mod_base = OTHER; note = 2'-O-methyluridine-3'-phosphate
  modified_base 21: mod_base = OTHER; note = 2'-O-methylguanosine-3'-phosphorothioate
  modified_base 22: mod_base = OTHER; note = 2'-O-methyladenosine-3'-phosphorothioate
  modified_base 23: mod_base = OTHER; note = 2'-O-methyluridine-3'-phosphate
  misc_feature 1..4: note = RNA
  misc_feature 5: note = DNA
  misc_feature 6..23: note = RNA
actgtgacagtagcaaagctgat

SEQ ID NO: 7783 - DNA, 23 bp, synthetic construct
  source 1..23: mol_type = other DNA
  modified_base 1: mod_base = OTHER; note = 2'-O-methyladenosine-3'-phosphorothioate
  modified_base 2: mod_base = OTHER; note = 2'-fluoroguanosine-3'-phosphorothioate
  modified_base 3: mod_base = OTHER; note = 2'-O-methyluridine-3'-phosphate
  modified_base 4: mod_base = OTHER; note = 2'-O-methylcytidine-3'-phosphate
  modified_base 6: mod_base = OTHER; note = 2'-O-methylguanosine-3'-phosphate
  modified_base 7: mod_base = OTHER; note = Thymidine-glycol nucleic acid (GNA) S-Isomer
  modified_base 8: mod_base = OTHER; note = 2'-O-methylguanosine-3'-phosphate
  modified_base 9: mod_base = OTHER; note = 2'-O-methyladenosine-3'-phosphate
  modified_base 10: mod_base = OTHER; note = 2'-O-methylcytidine-3'-phosphate
  modified_base 11: mod_base = OTHER; note = 2'-O-methyladenosine-3'-phosphate
  modified_base 12: mod_base = OTHER; note = 2'-O-methylguanosine-3'-phosphate
  modified_base 13: mod_base = OTHER; note = 2'-O-methyluridine-3'-phosphate
  modified_base 14: mod_base = OTHER; note = 2'-fluoroadenosine-3'-phosphate
  modified_base 15: mod_base = OTHER; note = 2'-O-methylguanosine-3'-phosphate
  modified_base 16: mod_base = OTHER; note = 2'-fluorocytidine-3'-phosphate
  modified_base 17: mod_base = OTHER; note = 2'-O-methyladenosine-3'-phosphate
  modified_base 18: mod_base = OTHER; note = 2'-O-methyladenosine-3'-phosphate
  modified_base 19: mod_base = OTHER; note = 2'-O-methyladenosine-3'-phosphate
  modified_base 20: mod_base = OTHER; note = 2'-O-methylguanosine-3'-phosphate
  modified_base 21: mod_base = OTHER; note = 2'-O-methylcytidine-3'-phosphorothioate
  modified_base 22: mod_base = OTHER; note = 2'-O-methyluridine-3'-phosphorothioate
  modified_base 23: mod_base = OTHER; note = 2'-O-methylguanosine-3'-phosphate
  misc_feature 1..4: note = RNA
  misc_feature 5: note = DNA
  misc_feature 6: note = RNA
  misc_feature 7: note = DNA
  misc_feature 8..23: note = RNA
agtctgtgacagtagcaaagctg

SEQ ID NO: 7784 - DNA, 23 bp, synthetic construct
  source 1..23: mol_type = other DNA
  modified_base 1: mod_base = OTHER; note = 2'-O-methyladenosine-3'-phosphorothioate
  modified_base 2: mod_base = OTHER; note = 2'-fluoroguanosine-3'-phosphorothioate
  modified_base 3: mod_base = OTHER; note = 2'-O-methyladenosine-3'-phosphate
  modified_base 4: mod_base = OTHER; note = 2'-O-methylguanosine-3'-phosphate
  modified_base 6: mod_base = OTHER; note = 2'-O-methylcytidine-3'-phosphate
  modified_base 7: mod_base = OTHER; note = Thymidine-glycol nucleic acid (GNA) S-Isomer
  modified_base 8: mod_base = OTHER; note = 2'-O-methylguanosine-3'-phosphate
  modified_base 9: mod_base = OTHER; note = 2'-O-methyluridine-3'-phosphate
  modified_base 10: mod_base = OTHER; note = 2'-O-methylguanosine-3'-phosphate
  modified_base 11: mod_base = OTHER; note = 2'-O-methyladenosine-3'-phosphate
  modified_base 12: mod_base = OTHER; note = 2'-O-methylcytidine-3'-phosphate
  modified_base 13: mod_base = OTHER; note = 2'-O-methyladenosine-3'-phosphate
  modified_base 14: mod_base = OTHER; note = 2'-fluoroguanosine-3'-phosphate
  modified_base 15: mod_base = OTHER; note = 2'-O-methyluridine-3'-phosphate
  modified_base 16: mod_base = OTHER; note = 2'-fluoroadenosine-3'-phosphate
  modified_base 17: mod_base = OTHER; note = 2'-O-methylguanosine-3'-phosphate
  modified_base 18: mod_base = OTHER; note = 2'-O-methylcytidine-3'-phosphate
  modified_base 19: mod_base = OTHER; note = 2'-O-methyladenosine-3'-phosphate
  modified_base 20: mod_base = OTHER; note = 2'-O-methyladenosine-3'-phosphate
  modified_base 21: mod_base = OTHER; note = 2'-O-methyladenosine-3'-phosphorothioate
  modified_base 22: mod_base = OTHER; note = 2'-O-methylguanosine-3'-phosphorothioate
  modified_base 23: mod_base = OTHER; note = 2'-O-methylcytidine-3'-phosphate
  misc_feature 1..4: note = RNA
  misc_feature 5: note = DNA
  misc_feature 6: note = RNA
  misc_feature 7: note = DNA
  misc_feature 8..23: note = RNA
agagtctgtgacagtagcaaagc

SEQ ID NO: 7785 - DNA, 23 bp, synthetic construct
  source 1..23: mol_type = other DNA
  modified_base 1: mod_base = OTHER; note = 2'-O-methyladenosine-3'-phosphorothioate
  modified_base 2: mod_base = OTHER; note = 2'-fluorouridine -3'-phosphorothioate
  modified_base 3: mod_base = OTHER; note = 2'-O-methylguanosine-3'-phosphate
  modified_base 4: mod_base = OTHER; note = 2'-O-methylguanosine-3'-phosphate
  modified_base 6: mod_base = OTHER; note = 2'-O-methylguanosine-3'-phosphate
  modified_base 7: mod_base = OTHER; note = Thymidine-glycol nucleic acid (GNA) S-Isomer
  modified_base 8: mod_base = OTHER; note = 2'-O-methylcytidine-3'-phosphate
  modified_base 9: mod_base = OTHER; note = 2'-O-methyluridine-3'-phosphate
  modified_base 10: mod_base = OTHER; note = 2'-O-methylguanosine-3'-phosphate
  modified_base 11: mod_base = OTHER; note = 2'-O-methyluridine-3'-phosphate
  modified_base 12: mod_base = OTHER; note = 2'-O-methylguanosine-3'-phosphate
  modified_base 13: mod_base = OTHER; note = 2'-O-methyladenosine-3'-phosphate
  modified_base 14: mod_base = OTHER; note = 2'-fluorocytidine-3'-phosphate
  modified_base 15: mod_base = OTHER; note = 2'-O-methyladenosine-3'-phosphate
  modified_base 16: mod_base = OTHER; note = 2'-fluoroguanosine-3'-phosphate
  modified_base 17: mod_base = OTHER; note = 2'-O-methyluridine-3'-phosphate
  modified_base 18: mod_base = OTHER; note = 2'-O-methyladenosine-3'-phosphate
  modified_base 19: mod_base = OTHER; note = 2'-O-methylguanosine-3'-phosphate
  modified_base 20: mod_base = OTHER; note = 2'-O-methylcytidine-3'-phosphate
  modified_base 21: mod_base = OTHER; note = 2'-O-methyladenosine-3'-phosphorothioate
  modified_base 22: mod_base = OTHER; note = 2'-O-methyladenosine-3'-phosphorothioate
  modified_base 23: mod_base = OTHER; note = 2'-O-methyladenosine-3'-phosphate
  misc_feature 1..4: note = RNA
  misc_feature 5: note = DNA
  misc_feature 6: note = RNA
  misc_feature 7: note = DNA
  misc_feature 8..23: note = RNA
atggagtctgtgacagtagcaaa

SEQ ID NO: 7786 - DNA, 23 bp, synthetic construct
  source 1..23: mol_type = other DNA
  modified_base 1: mod_base = OTHER; note = 2'-O-methyladenosine-3'-phosphorothioate
  modified_base 2: mod_base = OTHER; note = 2'-fluoroguanosine-3'-phosphorothioate
  modified_base 3: mod_base = OTHER; note = 2'-O-methylguanosine-3'-phosphate
  modified_base 4: mod_base = OTHER; note = 2'-O-methylcytidine-3'-phosphate
  modified_base 6: mod_base = OTHER; note = 2'-O-methylguanosine-3'-phosphate
  modified_base 7: mod_base = OTHER; note = Adenosine-glycol nucleic acid (GNA)
  modified_base 8: mod_base = OTHER; note = 2'-O-methyladenosine-3'-phosphate
  modified_base 9: mod_base = OTHER; note = 2'-O-methylguanosine-3'-phosphate
  modified_base 10: mod_base = OTHER; note = 2'-O-methyluridine-3'-phosphate
  modified_base 11: mod_base = OTHER; note = 2'-O-methylguanosine-3'-phosphate
  modified_base 12: mod_base = OTHER; note = 2'-O-methylguanosine-3'-phosphate
  modified_base 13: mod_base = OTHER; note = 2'-O-methyladenosine-3'-phosphate
  modified_base 14: mod_base = OTHER; note = 2'-fluoroguanosine-3'-phosphate
  modified_base 15: mod_base = OTHER; note = 2'-O-methyluridine-3'-phosphate
  modified_base 16: mod_base = OTHER; note = 2'-fluorocytidine-3'-phosphate
  modified_base 17: mod_base = OTHER; note = 2'-O-methyluridine-3'-phosphate
  modified_base 18: mod_base = OTHER; note = 2'-O-methylguanosine-3'-phosphate
  modified_base 19: mod_base = OTHER; note = 2'-O-methyluridine-3'-phosphate
  modified_base 20: mod_base = OTHER; note = 2'-O-methylguanosine-3'-phosphate
  modified_base 21: mod_base = OTHER; note = 2'-O-methyladenosine-3'-phosphorothioate
  modified_base 22: mod_base = OTHER; note = 2'-O-methylcytidine-3'-phosphorothioate
  modified_base 23: mod_base = OTHER; note = 2'-O-methyladenosine-3'-phosphate
  misc_feature 1..4: note = RNA
  misc_feature 5: note = DNA
  misc_feature 6..23: note = RNA
aggctgaagtggagtctgtgaca

SEQ ID NO: 7787 - DNA, 23 bp, synthetic construct
  source 1..23: mol_type = other DNA
  modified_base 1: mod_base = OTHER; note = 2'-O-methyladenosine-3'-phosphorothioate
  modified_base 2: mod_base = OTHER; note = 2'-fluorouridine -3'-phosphorothioate
  modified_base 3: mod_base = OTHER; note = 2'-O-methyladenosine-3'-phosphate
  modified_base 4: mod_base = OTHER; note = 2'-O-methylguanosine-3'-phosphate
  modified_base 6: mod_base = OTHER; note = 2'-O-methylcytidine-3'-phosphate
  modified_base 7: mod_base = OTHER; note = Thymidine-glycol nucleic acid (GNA) S-Isomer
  modified_base 8: mod_base = OTHER; note = 2'-O-methylguanosine-3'-phosphate
  modified_base 9: mod_base = OTHER; note = 2'-O-methyladenosine-3'-phosphate
  modified_base 10: mod_base = OTHER; note = 2'-O-methyladenosine-3'-phosphate
  modified_base 11: mod_base = OTHER; note = 2'-O-methylguanosine-3'-phosphate
  modified_base 12: mod_base = OTHER; note = 2'-O-methyluridine-3'-phosphate
  modified_base 13: mod_base = OTHER; note = 2'-O-methylguanosine-3'-phosphate
  modified_base 14: mod_base = OTHER; note = 2'-fluoroguanosine-3'-phosphate
  modified_base 15: mod_base = OTHER; note = 2'-O-methyladenosine-3'-phosphate
  modified_base 16: mod_base = OTHER; note = 2'-fluoroguanosine-3'-phosphate
  modified_base 17: mod_base = OTHER; note = 2'-O-methyluridine-3'-phosphate
  modified_base 18: mod_base = OTHER; note = 2'-O-methylcytidine-3'-phosphate
  modified_base 19: mod_base = OTHER; note = 2'-O-methyluridine-3'-phosphate
  modified_base 20: mod_base = OTHER; note = 2'-O-methylguanosine-3'-phosphate
  modified_base 21: mod_base = OTHER; note = 2'-O-methyluridine-3'-phosphorothioate
  modified_base 22: mod_base = OTHER; note = 2'-O-methylguanosine-3'-phosphorothioate
  modified_base 23: mod_base = OTHER; note = 2'-O-methyladenosine-3'-phosphate
  misc_feature 1..4: note = RNA
  misc_feature 5: note = DNA
  misc_feature 6: note = RNA
  misc_feature 7: note = DNA
  misc_feature 8..23: note = RNA
ataggctgaagtggagtctgtga

SEQ ID NO: 7788 - DNA, 23 bp, synthetic construct
  source 1..23: mol_type = other DNA
  modified_base 1: mod_base = OTHER; note = 2'-O-methyladenosine-3'-phosphorothioate
  modified_base 2: mod_base = OTHER; note = 2'-fluoroguanosine-3'-phosphorothioate
  modified_base 3: mod_base = OTHER; note = 2'-O-methylcytidine-3'-phosphate
  modified_base 4: mod_base = OTHER; note = 2'-O-methyluridine-3'-phosphate
  modified_base 6: mod_base = OTHER; note = 2'-O-methyluridine-3'-phosphate
  modified_base 7: mod_base = OTHER; note = Adenosine-glycol nucleic acid (GNA)
  modified_base 8: mod_base = OTHER; note = 2'-O-methylguanosine-3'-phosphate
  modified_base 9: mod_base = OTHER; note = 2'-O-methylguanosine-3'-phosphate
  modified_base 10: mod_base = OTHER; note = 2'-O-methylcytidine-3'-phosphate
  modified_base 11: mod_base = OTHER; note = 2'-O-methyluridine-3'-phosphate
  modified_base 12: mod_base = OTHER; note = 2'-O-methylguanosine-3'-phosphate
  modified_base 13: mod_base = OTHER; note = 2'-O-methyladenosine-3'-phosphate
  modified_base 14: mod_base = OTHER; note = 2'-fluoroadenosine-3'-phosphate
  modified_base 15: mod_base = OTHER; note = 2'-O-methylguanosine-3'-phosphate
  modified_base 16: mod_base = OTHER; note = 2'-fluorouridine-3'-phosphate
  modified_base 17: mod_base = OTHER; note = 2'-O-methylguanosine-3'-phosphate
  modified_base 18: mod_base = OTHER; note = 2'-O-methylguanosine-3'-phosphate
  modified_base 19: mod_base = OTHER; note = 2'-O-methyladenosine-3'-phosphate
  modified_base 20: mod_base = OTHER; note = 2'-O-methylguanosine-3'-phosphate
  modified_base 21: mod_base = OTHER; note = 2'-O-methyluridine-3'-phosphorothioate
  modified_base 22: mod_base = OTHER; note = 2'-O-methylcytidine-3'-phosphorothioate
  modified_base 23: mod_base = OTHER; note = 2'-O-methyluridine-3'-phosphate
  misc_feature 1..4: note = RNA
  misc_feature 5: note = DNA
  misc_feature 6..23: note = RNA
agctgtaggctgaagtggagtct

SEQ ID NO: 7789 - DNA, 23 bp, synthetic construct
  source 1..23: mol_type = other DNA
  modified_base 1: mod_base = OTHER; note = 2'-O-methyladenosine-3'-phosphorothioate
  modified_base 2: mod_base = OTHER; note = 2'-fluoroadenosine-3'-phosphorothioate
  modified_base 3: mod_base = OTHER; note = 2'-O-methylguanosine-3'-phosphate
  modified_base 4: mod_base = OTHER; note = 2'-O-methylcytidine-3'-phosphate
  modified_base 6: mod_base = OTHER; note = 2'-O-methylguanosine-3'-phosphate
  modified_base 7: mod_base = OTHER; note = Thymidine-glycol nucleic acid (GNA) S-Isomer
  modified_base 8: mod_base = OTHER; note = 2'-O-methyladenosine-3'-phosphate
  modified_base 9: mod_base = OTHER; note = 2'-O-methylguanosine-3'-phosphate
  modified_base 10: mod_base = OTHER; note = 2'-O-methylguanosine-3'-phosphate
  modified_base 11: mod_base = OTHER; note = 2'-O-methylcytidine-3'-phosphate
  modified_base 12: mod_base = OTHER; note = 2'-O-methyluridine-3'-phosphate
  modified_base 13: mod_base = OTHER; note = 2'-O-methylguanosine-3'-phosphate
  modified_base 14: mod_base = OTHER; note = 2'-fluoroadenosine-3'-phosphate
  modified_base 15: mod_base = OTHER; note = 2'-O-methyladenosine-3'-phosphate
  modified_base 16: mod_base = OTHER; note = 2'-fluoroguanosine-3'-phosphate
  modified_base 17: mod_base = OTHER; note = 2'-O-methyluridine-3'-phosphate
  modified_base 18: mod_base = OTHER; note = 2'-O-methylguanosine-3'-phosphate
  modified_base 19: mod_base = OTHER; note = 2'-O-methylguanosine-3'-phosphate
  modified_base 20: mod_base = OTHER; note = 2'-O-methyladenosine-3'-phosphate
  modified_base 21: mod_base = OTHER; note = 2'-O-methylguanosine-3'-phosphorothioate
  modified_base 22: mod_base = OTHER; note = 2'-O-methyluridine-3'-phosphorothioate
  modified_base 23: mod_base = OTHER; note = 2'-O-methylcytidine-3'-phosphate
  misc_feature 1..4: note = RNA
  misc_feature 5: note = DNA
  misc_feature 6: note = RNA
  misc_feature 7: note = DNA
  misc_feature 8..23: note = RNA
aagctgtaggctgaagtggagtc

SEQ ID NO: 7790 - DNA, 23 bp, synthetic construct
  source 1..23: mol_type = other DNA
  modified_base 1: mod_base = OTHER; note = 2'-O-methyladenosine-3'-phosphorothioate
  modified_base 2: mod_base = OTHER; note = 2'-fluoroguanosine-3'-phosphorothioate
  modified_base 3: mod_base = OTHER; note = 2'-O-methylguanosine-3'-phosphate
  modified_base 4: mod_base = OTHER; note = 2'-O-methyladenosine-3'-phosphate
  modified_base 6: mod_base = OTHER; note = 2'-O-methylcytidine-3'-phosphate
  modified_base 7: mod_base = OTHER; note = Thymidine-glycol nucleic acid (GNA) S-Isomer
  modified_base 8: mod_base = OTHER; note = 2'-O-methylguanosine-3'-phosphate
  modified_base 9: mod_base = OTHER; note = 2'-O-methyluridine-3'-phosphate
  modified_base 10: mod_base = OTHER; note = 2'-O-methyladenosine-3'-phosphate
  modified_base 11: mod_base = OTHER; note = 2'-O-methylguanosine-3'-phosphate
  modified_base 12: mod_base = OTHER; note = 2'-O-methylguanosine-3'-phosphate
  modified_base 13: mod_base = OTHER; note = 2'-O-methylcytidine-3'-phosphate
  modified_base 14: mod_base = OTHER; note = 2'-fluorouridine-3'-phosphate
  modified_base 15: mod_base = OTHER; note = 2'-O-methylguanosine-3'-phosphate
  modified_base 16: mod_base = OTHER; note = 2'-fluoroadenosine-3'-phosphate
  modified_base 17: mod_base = OTHER; note = 2'-O-methyladenosine-3'-phosphate
  modified_base 18: mod_base = OTHER; note = 2'-O-methylguanosine-3'-phosphate
  modified_base 19: mod_base = OTHER; note = 2'-O-methyluridine-3'-phosphate
  modified_base 20: mod_base = OTHER; note = 2'-O-methylguanosine-3'-phosphate
  modified_base 21: mod_base = OTHER; note = 2'-O-methylguanosine-3'-phosphorothioate
  modified_base 22: mod_base = OTHER; note = 2'-O-methyladenosine-3'-phosphorothioate
  modified_base 23: mod_base = OTHER; note = 2'-O-methylguanosine-3'-phosphate
  misc_feature 1..4: note = RNA
  misc_feature 5: note = DNA
  misc_feature 6: note = RNA
  misc_feature 7: note = DNA
  misc_feature 8..23: note = RNA
aggagctgtaggctgaagtggag

SEQ ID NO: 7791 - DNA, 23 bp, synthetic construct
  source 1..23: mol_type = other DNA
  modified_base 1: mod_base = OTHER; note = 2'-O-methyladenosine-3'-phosphorothioate
  modified_base 2: mod_base = OTHER; note = 2'-fluorouridine -3'-phosphorothioate
  modified_base 3: mod_base = OTHER; note = 2'-O-methylcytidine-3'-phosphate
  modified_base 4: mod_base = OTHER; note = 2'-O-methylcytidine-3'-phosphate
  modified_base 6: mod_base = OTHER; note = 2'-O-methylcytidine-3'-phosphate
  modified_base 7: mod_base = OTHER; note = Adenosine-glycol nucleic acid (GNA)
  modified_base 8: mod_base = OTHER; note = 2'-O-methyladenosine-3'-phosphate
  modified_base 9: mod_base = OTHER; note = 2'-O-methylguanosine-3'-phosphate
  modified_base 10: mod_base = OTHER; note = 2'-O-methylcytidine-3'-phosphate
  modified_base 11: mod_base = OTHER; note = 2'-O-methyladenosine-3'-phosphate
  modified_base 12: mod_base = OTHER; note = 2'-O-methyladenosine-3'-phosphate
  modified_base 13: mod_base = OTHER; note = 2'-O-methyladenosine-3'-phosphate
  modified_base 14: mod_base = OTHER; note = 2'-fluoroguanosine-3'-phosphate
  modified_base 15: mod_base = OTHER; note = 2'-O-methyladenosine-3'-phosphate
  modified_base 16: mod_base = OTHER; note = 2'-fluoroguanosine-3'-phosphate
  modified_base 17: mod_base = OTHER; note = 2'-O-methyluridine-3'-phosphate
  modified_base 18: mod_base = OTHER; note = 2'-O-methylguanosine-3'-phosphate
  modified_base 19: mod_base = OTHER; note = 2'-O-methylcytidine-3'-phosphate
  modified_base 20: mod_base = OTHER; note = 2'-O-methylcytidine-3'-phosphate
  modified_base 21: mod_base = OTHER; note = 2'-O-methyladenosine-3'-phosphorothioate
  modified_base 22: mod_base = OTHER; note = 2'-O-methylguanosine-3'-phosphorothioate
  modified_base 23: mod_base = OTHER; note = 2'-O-methylguanosine-3'-phosphate
  misc_feature 1..4: note = RNA
  misc_feature 5: note = DNA
  misc_feature 6..23: note = RNA
atcctcaagcaaagagtgccagg

SEQ ID NO: 7792 - DNA, 23 bp, synthetic construct
  source 1..23: mol_type = other DNA
  modified_base 1: mod_base = OTHER; note = 2'-O-methyladenosine-3'-phosphorothioate
  modified_base 2: mod_base = OTHER; note = 2'-fluoroguanosine-3'-phosphorothioate
  modified_base 3: mod_base = OTHER; note = 2'-O-methyladenosine-3'-phosphate
  modified_base 4: mod_base = OTHER; note = 2'-O-methyluridine-3'-phosphate
  modified_base 6: mod_base = OTHER; note = 2'-O-methylcytidine-3'-phosphate
  modified_base 7: mod_base = OTHER; note = Thymidine-glycol nucleic acid (GNA) S-Isomer
  modified_base 8: mod_base = OTHER; note = 2'-O-methylcytidine-3'-phosphate
  modified_base 9: mod_base = OTHER; note = 2'-O-methyladenosine-3'-phosphate
  modified_base 10: mod_base = OTHER; note = 2'-O-methyladenosine-3'-phosphate
  modified_base 11: mod_base = OTHER; note = 2'-O-methylguanosine-3'-phosphate
  modified_base 12: mod_base = OTHER; note = 2'-O-methylcytidine-3'-phosphate
  modified_base 13: mod_base = OTHER; note = 2'-O-methyladenosine-3'-phosphate
  modified_base 14: mod_base = OTHER; note = 2'-fluoroadenosine-3'-phosphate
  modified_base 15: mod_base = OTHER; note = 2'-O-methyladenosine-3'-phosphate
  modified_base 16: mod_base = OTHER; note = 2'-fluoroguanosine-3'-phosphate
  modified_base 17: mod_base = OTHER; note = 2'-O-methyladenosine-3'-phosphate
  modified_base 18: mod_base = OTHER; note = 2'-O-methylguanosine-3'-phosphate
  modified_base 19: mod_base = OTHER; note = 2'-O-methyluridine-3'-phosphate
  modified_base 20: mod_base = OTHER; note = 2'-O-methylguanosine-3'-phosphate
  modified_base 21: mod_base = OTHER; note = 2'-O-methylcytidine-3'-phosphorothioate
  modified_base 22: mod_base = OTHER; note = 2'-O-methylcytidine-3'-phosphorothioate
  modified_base 23: mod_base = OTHER; note = 2'-O-methyladenosine-3'-phosphate
  misc_feature 1..4: note = RNA
  misc_feature 5: note = DNA
  misc_feature 6: note = RNA
  misc_feature 7: note = DNA
  misc_feature 8..23: note = RNA
agatcctcaagcaaagagtgcca

SEQ ID NO: 7793 - DNA, 23 bp, synthetic construct
  source 1..23: mol_type = other DNA
  modified_base 1: mod_base = OTHER; note = 2'-O-methyladenosine-3'-phosphorothioate
  modified_base 2: mod_base = OTHER; note = 2'-fluoroguanosine-3'-phosphorothioate
  modified_base 3: mod_base = OTHER; note = 2'-O-methyladenosine-3'-phosphate
  modified_base 4: mod_base = OTHER; note = 2'-O-methyladenosine-3'-phosphate
  modified_base 6: mod_base = OTHER; note = 2'-O-methyladenosine-3'-phosphate
  modified_base 7: mod_base = OTHER; note = Thymidine-glycol nucleic acid (GNA) S-Isomer
  modified_base 8: mod_base = OTHER; note = 2'-O-methylcytidine-3'-phosphate
  modified_base 9: mod_base = OTHER; note = 2'-O-methylcytidine-3'-phosphate
  modified_base 10: mod_base = OTHER; note = 2'-O-methyluridine-3'-phosphate
  modified_base 11: mod_base = OTHER; note = 2'-O-methylcytidine-3'-phosphate
  modified_base 12: mod_base = OTHER; note = 2'-O-methyladenosine-3'-phosphate
  modified_base 13: mod_base = OTHER; note = 2'-O-methyladenosine-3'-phosphate
  modified_base 14: mod_base = OTHER; note = 2'-fluoroguanosine-3'-phosphate
  modified_base 15: mod_base = OTHER; note = 2'-O-methylcytidine-3'-phosphate
  modified_base 16: mod_base = OTHER; note = 2'-fluoroadenosine-3'-phosphate
  modified_base 17: mod_base = OTHER; note = 2'-O-methyladenosine-3'-phosphate
  modified_base 18: mod_base = OTHER; note = 2'-O-methyladenosine-3'-phosphate
  modified_base 19: mod_base = OTHER; note = 2'-O-methylguanosine-3'-phosphate
  modified_base 20: mod_base = OTHER; note = 2'-O-methyladenosine-3'-phosphate
  modified_base 21: mod_base = OTHER; note = 2'-O-methylguanosine-3'-phosphorothioate
  modified_base 22: mod_base = OTHER; note = 2'-O-methyluridine-3'-phosphorothioate
  modified_base 23: mod_base = OTHER; note = 2'-O-methylguanosine-3'-phosphate
  misc_feature 1..4: note = RNA
  misc_feature 5: note = DNA
  misc_feature 6: note = RNA
  misc_feature 7: note = DNA
  misc_feature 8..23: note = RNA
agaagatcctcaagcaaagagtg

SEQ ID NO: 7794 - DNA, 23 bp, synthetic construct
  source 1..23: mol_type = other DNA
  modified_base 1: mod_base = OTHER; note = 2'-O-methyladenosine-3'-phosphorothioate
  modified_base 2: mod_base = OTHER; note = 2'-fluoroguanosine-3'-phosphorothioate
  modified_base 3: mod_base = OTHER; note = 2'-O-methylguanosine-3'-phosphate
  modified_base 4: mod_base = OTHER; note = 2'-O-methyladenosine-3'-phosphate
  modified_base 6: mod_base = OTHER; note = 2'-O-methylguanosine-3'-phosphate
  modified_base 7: mod_base = OTHER; note = Adenosine-glycol nucleic acid (GNA)
  modified_base 8: mod_base = OTHER; note = 2'-O-methyluridine-3'-phosphate
  modified_base 9: mod_base = OTHER; note = 2'-O-methylcytidine-3'-phosphate
  modified_base 10: mod_base = OTHER; note = 2'-O-methylcytidine-3'-phosphate
  modified_base 11: mod_base = OTHER; note = 2'-O-methyluridine-3'-phosphate
  modified_base 12: mod_base = OTHER; note = 2'-O-methylcytidine-3'-phosphate
  modified_base 13: mod_base = OTHER; note = 2'-O-methyladenosine-3'-phosphate
  modified_base 14: mod_base = OTHER; note = 2'-fluoroadenosine-3'-phosphate
  modified_base 15: mod_base = OTHER; note = 2'-O-methylguanosine-3'-phosphate
  modified_base 16: mod_base = OTHER; note = 2'-fluorocytidine-3'-phosphate
  modified_base 17: mod_base = OTHER; note = 2'-O-methyladenosine-3'-phosphate
  modified_base 18: mod_base = OTHER; note = 2'-O-methyladenosine-3'-phosphate
  modified_base 19: mod_base = OTHER; note = 2'-O-methyladenosine-3'-phosphate
  modified_base 20: mod_base = OTHER; note = 2'-O-methylguanosine-3'-phosphate
  modified_base 21: mod_base = OTHER; note = 2'-O-methyladenosine-3'-phosphorothioate
  modified_base 22: mod_base = OTHER; note = 2'-O-methylguanosine-3'-phosphorothioate
  modified_base 23: mod_base = OTHER; note = 2'-O-methyluridine-3'-phosphate
  misc_feature 1..4: note = RNA
  misc_feature 5: note = DNA
  misc_feature 6..23: note = RNA
aggaagatcctcaagcaaagagt

SEQ ID NO: 7795 - DNA, 23 bp, synthetic construct
  source 1..23: mol_type = other DNA
  modified_base 1: mod_base = OTHER; note = 2'-O-methyladenosine-3'-phosphorothioate
  modified_base 2: mod_base = OTHER; note = 2'-fluorouridine -3'-phosphorothioate
  modified_base 3: mod_base = OTHER; note = 2'-O-methylcytidine-3'-phosphate
  modified_base 4: mod_base = OTHER; note = 2'-O-methylguanosine-3'-phosphate
  modified_base 6: mod_base = OTHER; note = 2'-O-methyladenosine-3'-phosphate
  modified_base 7: mod_base = OTHER; note = Adenosine-glycol nucleic acid (GNA)
  modified_base 8: mod_base = OTHER; note = 2'-O-methylguanosine-3'-phosphate
  modified_base 9: mod_base = OTHER; note = 2'-O-methyladenosine-3'-phosphate
  modified_base 10: mod_base = OTHER; note = 2'-O-methyluridine-3'-phosphate
  modified_base 11: mod_base = OTHER; note = 2'-O-methylcytidine-3'-phosphate
  modified_base 12: mod_base = OTHER; note = 2'-O-methylcytidine-3'-phosphate
  modified_base 13: mod_base = OTHER; note = 2'-O-methyluridine-3'-phosphate
  modified_base 14: mod_base = OTHER; note = 2'-fluorocytidine-3'-phosphate
  modified_base 15: mod_base = OTHER; note = 2'-O-methyladenosine-3'-phosphate
  modified_base 16: mod_base = OTHER; note = 2'-fluoroadenosine-3'-phosphate
  modified_base 17: mod_base = OTHER; note = 2'-O-methylguanosine-3'-phosphate
  modified_base 18: mod_base = OTHER; note = 2'-O-methylcytidine-3'-phosphate
  modified_base 19: mod_base = OTHER; note = 2'-O-methyladenosine-3'-phosphate
  modified_base 20: mod_base = OTHER; note = 2'-O-methyladenosine-3'-phosphate
  modified_base 21: mod_base = OTHER; note = 2'-O-methyladenosine-3'-phosphorothioate
  modified_base 22: mod_base = OTHER; note = 2'-O-methylguanosine-3'-phosphorothioate
  modified_base 23: mod_base = OTHER; note = 2'-O-methyladenosine-3'-phosphate
  misc_feature 1..4: note = RNA
  misc_feature 5: note = DNA
  misc_feature 6..23: note = RNA
atcggaagatcctcaagcaaaga

SEQ ID NO: 7796 - DNA, 23 bp, synthetic construct
  source 1..23: mol_type = other DNA
  modified_base 1: mod_base = OTHER; note = 2'-O-methyladenosine-3'-phosphorothioate
  modified_base 2: mod_base = OTHER; note = 2'-fluoroguanosine-3'-phosphorothioate
  modified_base 3: mod_base = OTHER; note = 2'-O-methylguanosine-3'-phosphate
  modified_base 4: mod_base = OTHER; note = 2'-O-methyluridine-3'-phosphate
  modified_base 6: mod_base = OTHER; note = 2'-O-methyladenosine-3'-phosphate
  modified_base 7: mod_base = OTHER; note = Thymidine-glycol nucleic acid (GNA) S-Isomer
  modified_base 8: mod_base = OTHER; note = 2'-O-methylguanosine-3'-phosphate
  modified_base 9: mod_base = OTHER; note = 2'-O-methyluridine-3'-phosphate
  modified_base 10: mod_base = OTHER; note = 2'-O-methylguanosine-3'-phosphate
  modified_base 11: mod_base = OTHER; note = 2'-O-methylguanosine-3'-phosphate
  modified_base 12: mod_base = OTHER; note = 2'-O-methyluridine-3'-phosphate
  modified_base 13: mod_base = OTHER; note = 2'-O-methylguanosine-3'-phosphate
  modified_base 14: mod_base = OTHER; note = 2'-fluorocytidine-3'-phosphate
  modified_base 15: mod_base = OTHER; note = 2'-O-methyluridine-3'-phosphate
  modified_base 16: mod_base = OTHER; note = 2'-fluorocytidine-3'-phosphate
  modified_base 17: mod_base = OTHER; note = 2'-O-methyladenosine-3'-phosphate
  modified_base 18: mod_base = OTHER; note = 2'-O-methylguanosine-3'-phosphate
  modified_base 19: mod_base = OTHER; note = 2'-O-methylcytidine-3'-phosphate
  modified_base 20: mod_base = OTHER; note = 2'-O-methylcytidine-3'-phosphate
  modified_base 21: mod_base = OTHER; note = 2'-O-methyladenosine-3'-phosphorothioate
  modified_base 22: mod_base = OTHER; note = 2'-O-methylguanosine-3'-phosphorothioate
  modified_base 23: mod_base = OTHER; note = 2'-O-methylguanosine-3'-phosphate
  misc_feature 1..4: note = RNA
  misc_feature 5: note = DNA
  misc_feature 6: note = RNA
  misc_feature 7: note = DNA
  misc_feature 8..23: note = RNA
aggtgatgtggtgctcagccagg

SEQ ID NO: 7797 - DNA, 23 bp, synthetic construct
  source 1..23: mol_type = other DNA
  modified_base 1: mod_base = OTHER; note = 2'-O-methyladenosine-3'-phosphorothioate
  modified_base 2: mod_base = OTHER; note = 2'-fluorouridine -3'-phosphorothioate
  modified_base 3: mod_base = OTHER; note = 2'-O-methylguanosine-3'-phosphate
  modified_base 4: mod_base = OTHER; note = 2'-O-methylguanosine-3'-phosphate
  modified_base 6: mod_base = OTHER; note = 2'-O-methylguanosine-3'-phosphate
  modified_base 7: mod_base = OTHER; note = Adenosine-glycol nucleic acid (GNA)
  modified_base 8: mod_base = OTHER; note = 2'-O-methyluridine-3'-phosphate
  modified_base 9: mod_base = OTHER; note = 2'-O-methylguanosine-3'-phosphate
  modified_base 10: mod_base = OTHER; note = 2'-O-methyluridine-3'-phosphate
  modified_base 11: mod_base = OTHER; note = 2'-O-methylguanosine-3'-phosphate
  modified_base 12: mod_base = OTHER; note = 2'-O-methylguanosine-3'-phosphate
  modified_base 13: mod_base = OTHER; note = 2'-O-methyluridine-3'-phosphate
  modified_base 14: mod_base = OTHER; note = 2'-fluoroguanosine-3'-phosphate
  modified_base 15: mod_base = OTHER; note = 2'-O-methylcytidine-3'-phosphate
  modified_base 16: mod_base = OTHER; note = 2'-fluorouridine-3'-phosphate
  modified_base 17: mod_base = OTHER; note = 2'-O-methylcytidine-3'-phosphate
  modified_base 18: mod_base = OTHER; note = 2'-O-methyladenosine-3'-phosphate
  modified_base 19: mod_base = OTHER; note = 2'-O-methylguanosine-3'-phosphate
  modified_base 20: mod_base = OTHER; note = 2'-O-methylcytidine-3'-phosphate
  modified_base 21: mod_base = OTHER; note = 2'-O-methylcytidine-3'-phosphorothioate
  modified_base 22: mod_base = OTHER; note = 2'-O-methyladenosine-3'-phosphorothioate
  modified_base 23: mod_base = OTHER; note = 2'-O-methylguanosine-3'-phosphate
  misc_feature 1..4: note = RNA
  misc_feature 5: note = DNA
  misc_feature 6..23: note = RNA
atggtgatgtggtgctcagccag

SEQ ID NO: 7798 - DNA, 23 bp, synthetic construct
  source 1..23: mol_type = other DNA
  modified_base 1: mod_base = OTHER; note = 2'-O-methyladenosine-3'-phosphorothioate
  modified_base 2: mod_base = OTHER; note = 2'-fluoroguanosine-3'-phosphorothioate
  modified_base 3: mod_base = OTHER; note = 2'-O-methyluridine-3'-phosphate
  modified_base 4: mod_base = OTHER; note = 2'-O-methyluridine-3'-phosphate
  modified_base 6: mod_base = OTHER; note = 2'-O-methylguanosine-3'-phosphate
  modified_base 7: mod_base = OTHER; note = Thymidine-glycol nucleic acid (GNA) S-Isomer
  modified_base 8: mod_base = OTHER; note = 2'-O-methylguanosine-3'-phosphate
  modified_base 9: mod_base = OTHER; note = 2'-O-methyladenosine-3'-phosphate
  modified_base 10: mod_base = OTHER; note = 2'-O-methyluridine-3'-phosphate
  modified_base 11: mod_base = OTHER; note = 2'-O-methylguanosine-3'-phosphate
  modified_base 12: mod_base = OTHER; note = 2'-O-methyluridine-3'-phosphate
  modified_base 13: mod_base = OTHER; note = 2'-O-methylguanosine-3'-phosphate
  modified_base 14: mod_base = OTHER; note = 2'-fluoroguanosine-3'-phosphate
  modified_base 15: mod_base = OTHER; note = 2'-O-methyluridine-3'-phosphate
  modified_base 16: mod_base = OTHER; note = 2'-fluoroguanosine-3'-phosphate
  modified_base 17: mod_base = OTHER; note = 2'-O-methylcytidine-3'-phosphate
  modified_base 18: mod_base = OTHER; note = 2'-O-methyluridine-3'-phosphate
  modified_base 19: mod_base = OTHER; note = 2'-O-methylcytidine-3'-phosphate
  modified_base 20: mod_base = OTHER; note = 2'-O-methyladenosine-3'-phosphate
  modified_base 21: mod_base = OTHER; note = 2'-O-methylguanosine-3'-phosphorothioate
  modified_base 22: mod_base = OTHER; note = 2'-O-methylcytidine-3'-phosphorothioate
  modified_base 23: mod_base = OTHER; note = 2'-O-methylcytidine-3'-phosphate
  misc_feature 1..4: note = RNA
  misc_feature 5: note = DNA
  misc_feature 6: note = RNA
  misc_feature 7: note = DNA
  misc_feature 8..23: note = RNA
agttggtgatgtggtgctcagcc

SEQ ID NO: 7799 - DNA, 23 bp, synthetic construct
  source 1..23: mol_type = other DNA
  modified_base 1: mod_base = OTHER; note = 2'-O-methyladenosine-3'-phosphorothioate
  modified_base 2: mod_base = OTHER; note = 2'-fluoroadenosine-3'-phosphorothioate
  modified_base 3: mod_base = OTHER; note = 2'-O-methylguanosine-3'-phosphate
  modified_base 4: mod_base = OTHER; note = 2'-O-methylcytidine-3'-phosphate
  modified_base 6: mod_base = OTHER; note = 2'-O-methylcytidine-3'-phosphate
  modified_base 7: mod_base = OTHER; note = Adenosine-glycol nucleic acid (GNA)
  modified_base 8: mod_base = OTHER; note = 2'-O-methylguanosine-3'-phosphate
  modified_base 9: mod_base = OTHER; note = 2'-O-methylguanosine-3'-phosphate
  modified_base 10: mod_base = OTHER; note = 2'-O-methyluridine-3'-phosphate
  modified_base 11: mod_base = OTHER; note = 2'-O-methyluridine-3'-phosphate
  modified_base 12: mod_base = OTHER; note = 2'-O-methylguanosine-3'-phosphate
  modified_base 13: mod_base = OTHER; note = 2'-O-methylguanosine-3'-phosphate
  modified_base 14: mod_base = OTHER; note = 2'-fluorouridine-3'-phosphate
  modified_base 15: mod_base = OTHER; note = 2'-O-methylguanosine-3'-phosphate
  modified_base 16: mod_base = OTHER; note = 2'-fluoroadenosine-3'-phosphate
  modified_base 17: mod_base = OTHER; note = 2'-O-methyluridine-3'-phosphate
  modified_base 18: mod_base = OTHER; note = 2'-O-methylguanosine-3'-phosphate
  modified_base 19: mod_base = OTHER; note = 2'-O-methyluridine-3'-phosphate
  modified_base 20: mod_base = OTHER; note = 2'-O-methylguanosine-3'-phosphate
  modified_base 21: mod_base = OTHER; note = 2'-O-methylguanosine-3'-phosphorothioate
  modified_base 22: mod_base = OTHER; note = 2'-O-methyluridine-3'-phosphorothioate
  modified_base 23: mod_base = OTHER; note = 2'-O-methylguanosine-3'-phosphate
  misc_feature 1..4: note = RNA
  misc_feature 5: note = DNA
  misc_feature 6..23: note = RNA
aagcccaggttggtgatgtggtg

SEQ ID NO: 7800 - DNA, 23 bp, synthetic construct
  source 1..23: mol_type = other DNA
  modified_base 1: mod_base = OTHER; note = 2'-O-methyladenosine-3'-phosphorothioate
  modified_base 2: mod_base = OTHER; note = 2'-fluoroadenosine-3'-phosphorothioate
  modified_base 3: mod_base = OTHER; note = 2'-O-methyluridine-3'-phosphate
  modified_base 4: mod_base = OTHER; note = 2'-O-methylguanosine-3'-phosphate
  modified_base 6: mod_base = OTHER; note = 2'-O-methylcytidine-3'-phosphate
  modified_base 7: mod_base = OTHER; note = Adenosine-glycol nucleic acid (GNA)
  modified_base 8: mod_base = OTHER; note = 2'-O-methylguanosine-3'-phosphate
  modified_base 9: mod_base = OTHER; note = 2'-O-methylcytidine-3'-phosphate
  modified_base 10: mod_base = OTHER; note = 2'-O-methylcytidine-3'-phosphate
  modified_base 11: mod_base = OTHER; note = 2'-O-methylcytidine-3'-phosphate
  modified_base 12: mod_base = OTHER; note = 2'-O-methyladenosine-3'-phosphate
  modified_base 13: mod_base = OTHER; note = 2'-O-methylguanosine-3'-phosphate
  modified_base 14: mod_base = OTHER; note = 2'-fluoroguanosine-3'-phosphate
  modified_base 15: mod_base = OTHER; note = 2'-O-methyluridine-3'-phosphate
  modified_base 16: mod_base = OTHER; note = 2'-fluorouridine-3'-phosphate
  modified_base 17: mod_base = OTHER; note = 2'-O-methylguanosine-3'-phosphate
  modified_base 18: mod_base = OTHER; note = 2'-O-methylguanosine-3'-phosphate
  modified_base 19: mod_base = OTHER; note = 2'-O-methyluridine-3'-phosphate
  modified_base 20: mod_base = OTHER; note = 2'-O-methylguanosine-3'-phosphate
  modified_base 21: mod_base = OTHER; note = 2'-O-methyladenosine-3'-phosphorothioate
  modified_base 22: mod_base = OTHER; note = 2'-O-methyluridine-3'-phosphorothioate
  modified_base 23: mod_base = OTHER; note = 2'-O-methylguanosine-3'-phosphate
  misc_feature 1..4: note = RNA
  misc_feature 5: note = DNA
  misc_feature 6..23: note = RNA
aatgccagcccaggttggtgatg

SEQ ID NO: 7801 - DNA, 23 bp, synthetic construct
  source 1..23: mol_type = other DNA
  modified_base 1: mod_base = OTHER; note = 2'-O-methyladenosine-3'-phosphorothioate
  modified_base 2: mod_base = OTHER; note = 2'-fluoroadenosine-3'-phosphorothioate
  modified_base 3: mod_base = OTHER; note = 2'-O-methylcytidine-3'-phosphate
  modified_base 4: mod_base = OTHER; note = 2'-O-methyluridine-3'-phosphate
  modified_base 6: mod_base = OTHER; note = 2'-O-methylguanosine-3'-phosphate
  modified_base 7: mod_base = OTHER; note = Adenosine-glycol nucleic acid (GNA)
  modified_base 8: mod_base = OTHER; note = 2'-O-methylguanosine-3'-phosphate
  modified_base 9: mod_base = OTHER; note = 2'-O-methylguanosine-3'-phosphate
  modified_base 10: mod_base = OTHER; note = 2'-O-methylguanosine-3'-phosphate
  modified_base 11: mod_base = OTHER; note = 2'-O-methylcytidine-3'-phosphate
  modified_base 12: mod_base = OTHER; note = 2'-O-methyladenosine-3'-phosphate
  modified_base 13: mod_base = OTHER; note = 2'-O-methylguanosine-3'-phosphate
  modified_base 14: mod_base = OTHER; note = 2'-fluoroadenosine-3'-phosphate
  modified_base 15: mod_base = OTHER; note = 2'-O-methylguanosine-3'-phosphate
  modified_base 16: mod_base = OTHER; note = 2'-fluorouridine-3'-phosphate
  modified_base 17: mod_base = OTHER; note = 2'-O-methyluridine-3'-phosphate
  modified_base 18: mod_base = OTHER; note = 2'-O-methyladenosine-3'-phosphate
  modified_base 19: mod_base = OTHER; note = 2'-O-methyladenosine-3'-phosphate
  modified_base 20: mod_base = OTHER; note = 2'-O-methylguanosine-3'-phosphate
  modified_base 21: mod_base = OTHER; note = 2'-O-methylguanosine-3'-phosphorothioate
  modified_base 22: mod_base = OTHER; note = 2'-O-methyluridine-3'-phosphorothioate
  modified_base 23: mod_base = OTHER; note = 2'-O-methyladenosine-3'-phosphate
  misc_feature 1..4: note = RNA
  misc_feature 5: note = DNA
  misc_feature 6..23: note = RNA
aactagagggcagagttaaggta

SEQ ID NO: 7802 - DNA, 23 bp, synthetic construct
  source 1..23: mol_type = other DNA
  modified_base 1: mod_base = OTHER; note = 2'-O-methyladenosine-3'-phosphorothioate
  modified_base 2: mod_base = OTHER; note = 2'-fluoroguanosine-3'-phosphorothioate
  modified_base 3: mod_base = OTHER; note = 2'-O-methylcytidine-3'-phosphate
  modified_base 4: mod_base = OTHER; note = 2'-O-methylcytidine-3'-phosphate
  modified_base 6: mod_base = OTHER; note = 2'-O-methylcytidine-3'-phosphate
  modified_base 7: mod_base = OTHER; note = Thymidine-glycol nucleic acid (GNA) S-Isomer
  modified_base 8: mod_base = OTHER; note = 2'-O-methyladenosine-3'-phosphate
  modified_base 9: mod_base = OTHER; note = 2'-O-methylguanosine-3'-phosphate
  modified_base 10: mod_base = OTHER; note = 2'-O-methyladenosine-3'-phosphate
  modified_base 11: mod_base = OTHER; note = 2'-O-methylguanosine-3'-phosphate
  modified_base 12: mod_base = OTHER; note = 2'-O-methylguanosine-3'-phosphate
  modified_base 13: mod_base = OTHER; note = 2'-O-methylguanosine-3'-phosphate
  modified_base 14: mod_base = OTHER; note = 2'-fluorocytidine-3'-phosphate
  modified_base 15: mod_base = OTHER; note = 2'-O-methyladenosine-3'-phosphate
  modified_base 16: mod_base = OTHER; note = 2'-fluoroguanosine-3'-phosphate
  modified_base 17: mod_base = OTHER; note = 2'-O-methyladenosine-3'-phosphate
  modified_base 18: mod_base = OTHER; note = 2'-O-methylguanosine-3'-phosphate
  modified_base 19: mod_base = OTHER; note = 2'-O-methyluridine-3'-phosphate
  modified_base 20: mod_base = OTHER; note = 2'-O-methyluridine-3'-phosphate
  modified_base 21: mod_base = OTHER; note = 2'-O-methyladenosine-3'-phosphorothioate
  modified_base 22: mod_base = OTHER; note = 2'-O-methyladenosine-3'-phosphorothioate
  modified_base 23: mod_base = OTHER; note = 2'-O-methylguanosine-3'-phosphate
  misc_feature 1..4: note = RNA
  misc_feature 5: note = DNA
  misc_feature 6: note = RNA
  misc_feature 7: note = DNA
  misc_feature 8..23: note = RNA
agccactagagggcagagttaag

SEQ ID NO: 7803 - DNA, 23 bp, synthetic construct
  source 1..23: mol_type = other DNA
  modified_base 1: mod_base = OTHER; note = 2'-O-methyladenosine-3'-phosphorothioate
  modified_base 2: mod_base = OTHER; note = 2'-fluoroguanosine-3'-phosphorothioate
  modified_base 3: mod_base = OTHER; note = 2'-O-methylcytidine-3'-phosphate
  modified_base 4: mod_base = OTHER; note = 2'-O-methyladenosine-3'-phosphate
  modified_base 6: mod_base = OTHER; note = 2'-O-methyluridine-3'-phosphate
  modified_base 7: mod_base = OTHER; note = Thymidine-glycol nucleic acid (GNA) S-Isomer
  modified_base 8: mod_base = OTHER; note = 2'-O-methyluridine-3'-phosphate
  modified_base 9: mod_base = OTHER; note = 2'-O-methylcytidine-3'-phosphate
  modified_base 10: mod_base = OTHER; note = 2'-O-methyladenosine-3'-phosphate
  modified_base 11: mod_base = OTHER; note = 2'-O-methylguanosine-3'-phosphate
  modified_base 12: mod_base = OTHER; note = 2'-O-methylguanosine-3'-phosphate
  modified_base 13: mod_base = OTHER; note = 2'-O-methyladenosine-3'-phosphate
  modified_base 14: mod_base = OTHER; note = 2'-fluorocytidine-3'-phosphate
  modified_base 15: mod_base = OTHER; note = 2'-O-methyladenosine-3'-phosphate
  modified_base 16: mod_base = OTHER; note = 2'-fluorocytidine-3'-phosphate
  modified_base 17: mod_base = OTHER; note = 2'-O-methylcytidine-3'-phosphate
  modified_base 18: mod_base = OTHER; note = 2'-O-methyladenosine-3'-phosphate
  modified_base 19: mod_base = OTHER; note = 2'-O-methylguanosine-3'-phosphate
  modified_base 20: mod_base = OTHER; note = 2'-O-methyladenosine-3'-phosphate
  modified_base 21: mod_base = OTHER; note = 2'-O-methylcytidine-3'-phosphorothioate
  modified_base 22: mod_base = OTHER; note = 2'-O-methyluridine-3'-phosphorothioate
  modified_base 23: mod_base = OTHER; note = 2'-O-methyluridine-3'-phosphate
  misc_feature 1..4: note = RNA
  misc_feature 5: note = DNA
  misc_feature 6: note = RNA
  misc_feature 7: note = DNA
  misc_feature 8..23: note = RNA
agcagtttcaggacaccagactt

SEQ ID NO: 7804 - DNA, 23 bp, synthetic construct
  source 1..23: mol_type = other DNA
  modified_base 1: mod_base = OTHER; note = 2'-O-methyladenosine-3'-phosphorothioate
  modified_base 2: mod_base = OTHER; note = 2'-fluorouridine -3'-phosphorothioate
  modified_base 3: mod_base = OTHER; note = 2'-O-methylguanosine-3'-phosphate
  modified_base 4: mod_base = OTHER; note = 2'-O-methylcytidine-3'-phosphate
  modified_base 6: mod_base = OTHER; note = 2'-O-methylguanosine-3'-phosphate
  modified_base 7: mod_base = OTHER; note = Thymidine-glycol nucleic acid (GNA) S-Isomer
  modified_base 8: mod_base = OTHER; note = 2'-O-methyluridine-3'-phosphate
  modified_base 9: mod_base = OTHER; note = 2'-O-methyluridine-3'-phosphate
  modified_base 10: mod_base = OTHER; note = 2'-O-methylcytidine-3'-phosphate
  modified_base 11: mod_base = OTHER; note = 2'-O-methyladenosine-3'-phosphate
  modified_base 12: mod_base = OTHER; note = 2'-O-methylguanosine-3'-phosphate
  modified_base 13: mod_base = OTHER; note = 2'-O-methylguanosine-3'-phosphate
  modified_base 14: mod_base = OTHER; note = 2'-fluoroadenosine-3'-phosphate
  modified_base 15: mod_base = OTHER; note = 2'-O-methylcytidine-3'-phosphate
  modified_base 16: mod_base = OTHER; note = 2'-fluoroadenosine-3'-phosphate
  modified_base 17: mod_base = OTHER; note = 2'-O-methylcytidine-3'-phosphate
  modified_base 18: mod_base = OTHER; note = 2'-O-methylcytidine-3'-phosphate
  modified_base 19: mod_base = OTHER; note = 2'-O-methyladenosine-3'-phosphate
  modified_base 20: mod_base = OTHER; note = 2'-O-methylguanosine-3'-phosphate
  modified_base 21: mod_base = OTHER; note = 2'-O-methyladenosine-3'-phosphorothioate
  modified_base 22: mod_base = OTHER; note = 2'-O-methylcytidine-3'-phosphorothioate
  modified_base 23: mod_base = OTHER; note = 2'-O-methyluridine-3'-phosphate
  misc_feature 1..4: note = RNA
  misc_feature 5: note = DNA
  misc_feature 6: note = RNA
  misc_feature 7: note = DNA
  misc_feature 8..23: note = RNA
atgcagtttcaggacaccagact

SEQ ID NO: 7805 - DNA, 23 bp, synthetic construct
  source 1..23: mol_type = other DNA
  modified_base 1: mod_base = OTHER; note = 2'-O-methyladenosine-3'-phosphorothioate
  modified_base 2: mod_base = OTHER; note = 2'-fluoroguanosine-3'-phosphorothioate
  modified_base 3: mod_base = OTHER; note = 2'-O-methyluridine-3'-phosphate
  modified_base 4: mod_base = OTHER; note = 2'-O-methyluridine-3'-phosphate
  modified_base 6: mod_base = OTHER; note = 2'-O-methylcytidine-3'-phosphate
  modified_base 7: mod_base = OTHER; note = Adenosine-glycol nucleic acid (GNA)
  modified_base 8: mod_base = OTHER; note = 2'-O-methylguanosine-3'-phosphate
  modified_base 9: mod_base = OTHER; note = 2'-O-methyluridine-3'-phosphate
  modified_base 10: mod_base = OTHER; note = 2'-O-methyluridine-3'-phosphate
  modified_base 11: mod_base = OTHER; note = 2'-O-methyluridine-3'-phosphate
  modified_base 12: mod_base = OTHER; note = 2'-O-methylcytidine-3'-phosphate
  modified_base 13: mod_base = OTHER; note = 2'-O-methyladenosine-3'-phosphate
  modified_base 14: mod_base = OTHER; note = 2'-fluoroguanosine-3'-phosphate
  modified_base 15: mod_base = OTHER; note = 2'-O-methylguanosine-3'-phosphate
  modified_base 16: mod_base = OTHER; note = 2'-fluoroadenosine-3'-phosphate
  modified_base 17: mod_base = OTHER; note = 2'-O-methylcytidine-3'-phosphate
  modified_base 18: mod_base = OTHER; note = 2'-O-methyladenosine-3'-phosphate
  modified_base 19: mod_base = OTHER; note = 2'-O-methylcytidine-3'-phosphate
  modified_base 20: mod_base = OTHER; note = 2'-O-methylcytidine-3'-phosphate
  modified_base 21: mod_base = OTHER; note = 2'-O-methyladenosine-3'-phosphorothioate
  modified_base 22: mod_base = OTHER; note = 2'-O-methylguanosine-3'-phosphorothioate
  modified_base 23: mod_base = OTHER; note = 2'-O-methyladenosine-3'-phosphate
  misc_feature 1..4: note = RNA
  misc_feature 5: note = DNA
  misc_feature 6..23: note = RNA
agttgcagtttcaggacaccaga

SEQ ID NO: 7806 - DNA, 23 bp, synthetic construct
  source 1..23: mol_type = other DNA
  modified_base 1: mod_base = OTHER; note = 2'-O-methyladenosine-3'-phosphorothioate
  modified_base 2: mod_base = OTHER; note = 2'-fluorouridine -3'-phosphorothioate
  modified_base 3: mod_base = OTHER; note = 2'-O-methylcytidine-3'-phosphate
  modified_base 4: mod_base = OTHER; note = 2'-O-methyluridine-3'-phosphate
  modified_base 6: mod_base = OTHER; note = 2'-O-methylguanosine-3'-phosphate
  modified_base 7: mod_base = OTHER; note = Thymidine-glycol nucleic acid (GNA) S-Isomer
  modified_base 8: mod_base = OTHER; note = 2'-O-methyluridine-3'-phosphate
  modified_base 9: mod_base = OTHER; note = 2'-O-methylguanosine-3'-phosphate
  modified_base 10: mod_base = OTHER; note = 2'-O-methylcytidine-3'-phosphate
  modified_base 11: mod_base = OTHER; note = 2'-O-methyladenosine-3'-phosphate
  modified_base 12: mod_base = OTHER; note = 2'-O-methylguanosine-3'-phosphate
  modified_base 13: mod_base = OTHER; note = 2'-O-methyluridine-3'-phosphate
  modified_base 14: mod_base = OTHER; note = 2'-fluorouridine-3'-phosphate
  modified_base 15: mod_base = OTHER; note = 2'-O-methyluridine-3'-phosphate
  modified_base 16: mod_base = OTHER; note = 2'-fluorocytidine-3'-phosphate
  modified_base 17: mod_base = OTHER; note = 2'-O-methyladenosine-3'-phosphate
  modified_base 18: mod_base = OTHER; note = 2'-O-methylguanosine-3'-phosphate
  modified_base 19: mod_base = OTHER; note = 2'-O-methylguanosine-3'-phosphate
  modified_base 20: mod_base = OTHER; note = 2'-O-methyladenosine-3'-phosphate
  modified_base 21: mod_base = OTHER; note = 2'-O-methylcytidine-3'-phosphorothioate
  modified_base 22: mod_base = OTHER; note = 2'-O-methyladenosine-3'-phosphorothioate
  modified_base 23: mod_base = OTHER; note = 2'-O-methylcytidine-3'-phosphate
  misc_feature 1..4: note = RNA
  misc_feature 5: note = DNA
  misc_feature 6: note = RNA
  misc_feature 7: note = DNA
  misc_feature 8..23: note = RNA
atctagttgcagtttcaggacac

SEQ ID NO: 7807 - DNA, 23 bp, synthetic construct
  source 1..23: mol_type = other DNA
  modified_base 1: mod_base = OTHER; note = 2'-O-methyladenosine-3'-phosphorothioate
  modified_base 2: mod_base = OTHER; note = 2'-fluoroadenosine-3'-phosphorothioate
  modified_base 3: mod_base = OTHER; note = 2'-O-methylguanosine-3'-phosphate
  modified_base 4: mod_base = OTHER; note = 2'-O-methyluridine-3'-phosphate
  modified_base 6: mod_base = OTHER; note = 2'-O-methyluridine-3'-phosphate
  modified_base 7: mod_base = OTHER; note = Adenosine-glycol nucleic acid (GNA)
  modified_base 8: mod_base = OTHER; note = 2'-O-methylguanosine-3'-phosphate
  modified_base 9: mod_base = OTHER; note = 2'-O-methyluridine-3'-phosphate
  modified_base 10: mod_base = OTHER; note = 2'-O-methyluridine-3'-phosphate
  modified_base 11: mod_base = OTHER; note = 2'-O-methylguanosine-3'-phosphate
  modified_base 12: mod_base = OTHER; note = 2'-O-methylcytidine-3'-phosphate
  modified_base 13: mod_base = OTHER; note = 2'-O-methyladenosine-3'-phosphate
  modified_base 14: mod_base = OTHER; note = 2'-fluoroguanosine-3'-phosphate
  modified_base 15: mod_base = OTHER; note = 2'-O-methyluridine-3'-phosphate
  modified_base 16: mod_base = OTHER; note = 2'-fluorouridine-3'-phosphate
  modified_base 17: mod_base = OTHER; note = 2'-O-methyluridine-3'-phosphate
  modified_base 18: mod_base = OTHER; note = 2'-O-methylcytidine-3'-phosphate
  modified_base 19: mod_base = OTHER; note = 2'-O-methyladenosine-3'-phosphate
  modified_base 20: mod_base = OTHER; note = 2'-O-methylguanosine-3'-phosphate
  modified_base 21: mod_base = OTHER; note = 2'-O-methylguanosine-3'-phosphorothioate
  modified_base 22: mod_base = OTHER; note = 2'-O-methyladenosine-3'-phosphorothioate
  modified_base 23: mod_base = OTHER; note = 2'-O-methylcytidine-3'-phosphate
  misc_feature 1..4: note = RNA
  misc_feature 5: note = DNA
  misc_feature 6..23: note = RNA
aagtctagttgcagtttcaggac

SEQ ID NO: 7808 - DNA, 23 bp, synthetic construct
  source 1..23: mol_type = other DNA
  modified_base 1: mod_base = OTHER; note = 2'-O-methyladenosine-3'-phosphorothioate
  modified_base 2: mod_base = OTHER; note = 2'-fluorocytidine-3'-phosphorothioate
  modified_base 3: mod_base = OTHER; note = 2'-O-methyladenosine-3'-phosphate
  modified_base 4: mod_base = OTHER; note = 2'-O-methylguanosine-3'-phosphate
  modified_base 6: mod_base = OTHER; note = 2'-O-methylcytidine-3'-phosphate
  modified_base 7: mod_base = OTHER; note = Thymidine-glycol nucleic acid (GNA) S-Isomer
  modified_base 8: mod_base = OTHER; note = 2'-O-methyladenosine-3'-phosphate
  modified_base 9: mod_base = OTHER; note = 2'-O-methylguanosine-3'-phosphate
  modified_base 10: mod_base = OTHER; note = 2'-O-methyluridine-3'-phosphate
  modified_base 11: mod_base = OTHER; note = 2'-O-methyluridine-3'-phosphate
  modified_base 12: mod_base = OTHER; note = 2'-O-methylguanosine-3'-phosphate
  modified_base 13: mod_base = OTHER; note = 2'-O-methylcytidine-3'-phosphate
  modified_base 14: mod_base = OTHER; note = 2'-fluoroadenosine-3'-phosphate
  modified_base 15: mod_base = OTHER; note = 2'-O-methylguanosine-3'-phosphate
  modified_base 16: mod_base = OTHER; note = 2'-fluorouridine-3'-phosphate
  modified_base 17: mod_base = OTHER; note = 2'-O-methyluridine-3'-phosphate
  modified_base 18: mod_base = OTHER; note = 2'-O-methyluridine-3'-phosphate
  modified_base 19: mod_base = OTHER; note = 2'-O-methylcytidine-3'-phosphate
  modified_base 20: mod_base = OTHER; note = 2'-O-methyladenosine-3'-phosphate
  modified_base 21: mod_base = OTHER; note = 2'-O-methylguanosine-3'-phosphorothioate
  modified_base 22: mod_base = OTHER; note = 2'-O-methylguanosine-3'-phosphorothioate
  modified_base 23: mod_base = OTHER; note = 2'-O-methyladenosine-3'-phosphate
  misc_feature 1..4: note = RNA
  misc_feature 5: note = DNA
  misc_feature 6: note = RNA
  misc_feature 7: note = DNA
  misc_feature 8..23: note = RNA
acagtctagttgcagtttcagga

SEQ ID NO: 7809 - DNA, 23 bp, synthetic construct
  source 1..23: mol_type = other DNA
  modified_base 1: mod_base = OTHER; note = 2'-O-methyladenosine-3'-phosphorothioate
  modified_base 2: mod_base = OTHER; note = 2'-fluorouridine -3'-phosphorothioate
  modified_base 3: mod_base = OTHER; note = 2'-O-methylguanosine-3'-phosphate
  modified_base 4: mod_base = OTHER; note = 2'-O-methylcytidine-3'-phosphate
  modified_base 6: mod_base = OTHER; note = 2'-O-methylguanosine-3'-phosphate
  modified_base 7: mod_base = OTHER; note = Thymidine-glycol nucleic acid (GNA) S-Isomer
  modified_base 8: mod_base = OTHER; note = 2'-O-methylcytidine-3'-phosphate
  modified_base 9: mod_base = OTHER; note = 2'-O-methyluridine-3'-phosphate
  modified_base 10: mod_base = OTHER; note = 2'-O-methyladenosine-3'-phosphate
  modified_base 11: mod_base = OTHER; note = 2'-O-methylguanosine-3'-phosphate
  modified_base 12: mod_base = OTHER; note = 2'-O-methyluridine-3'-phosphate
  modified_base 13: mod_base = OTHER; note = 2'-O-methyluridine-3'-phosphate
  modified_base 14: mod_base = OTHER; note = 2'-fluoroguanosine-3'-phosphate
  modified_base 15: mod_base = OTHER; note = 2'-O-methylcytidine-3'-phosphate
  modified_base 16: mod_base = OTHER; note = 2'-fluoroadenosine-3'-phosphate
  modified_base 17: mod_base = OTHER; note = 2'-O-methylguanosine-3'-phosphate
  modified_base 18: mod_base = OTHER; note = 2'-O-methyluridine-3'-phosphate
  modified_base 19: mod_base = OTHER; note = 2'-O-methyluridine-3'-phosphate
  modified_base 20: mod_base = OTHER; note = 2'-O-methyluridine-3'-phosphate
  modified_base 21: mod_base = OTHER; note = 2'-O-methylcytidine-3'-phosphorothioate
  modified_base 22: mod_base = OTHER; note = 2'-O-methyladenosine-3'-phosphorothioate
  modified_base 23: mod_base = OTHER; note = 2'-O-methylguanosine-3'-phosphate
  misc_feature 1..4: note = RNA
  misc_feature 5: note = DNA
  misc_feature 6: note = RNA
  misc_feature 7: note = DNA
  misc_feature 8..23: note = RNA
atgcagtctagttgcagtttcag

SEQ ID NO: 7810 - DNA, 23 bp, synthetic construct
  source 1..23: mol_type = other DNA
  modified_base 1: mod_base = OTHER; note = 2'-O-methyladenosine-3'-phosphorothioate
  modified_base 2: mod_base = OTHER; note = 2'-fluorouridine -3'-phosphorothioate
  modified_base 3: mod_base = OTHER; note = 2'-O-methylcytidine-3'-phosphate
  modified_base 4: mod_base = OTHER; note = 2'-O-methyluridine-3'-phosphate
  modified_base 6: mod_base = OTHER; note = 2'-O-methylcytidine-3'-phosphate
  modified_base 7: mod_base = OTHER; note = Adenosine-glycol nucleic acid (GNA)
  modified_base 8: mod_base = OTHER; note = 2'-O-methylguanosine-3'-phosphate
  modified_base 9: mod_base = OTHER; note = 2'-O-methyluridine-3'-phosphate
  modified_base 10: mod_base = OTHER; note = 2'-O-methylcytidine-3'-phosphate
  modified_base 11: mod_base = OTHER; note = 2'-O-methyluridine-3'-phosphate
  modified_base 12: mod_base = OTHER; note = 2'-O-methyladenosine-3'-phosphate
  modified_base 13: mod_base = OTHER; note = 2'-O-methylguanosine-3'-phosphate
  modified_base 14: mod_base = OTHER; note = 2'-fluorouridine-3'-phosphate
  modified_base 15: mod_base = OTHER; note = 2'-O-methyluridine-3'-phosphate
  modified_base 16: mod_base = OTHER; note = 2'-fluoroguanosine-3'-phosphate
  modified_base 17: mod_base = OTHER; note = 2'-O-methylcytidine-3'-phosphate
  modified_base 18: mod_base = OTHER; note = 2'-O-methyladenosine-3'-phosphate
  modified_base 19: mod_base = OTHER; note = 2'-O-methylguanosine-3'-phosphate
  modified_base 20: mod_base = OTHER; note = 2'-O-methyluridine-3'-phosphate
  modified_base 21: mod_base = OTHER; note = 2'-O-methyluridine-3'-phosphorothioate
  modified_base 22: mod_base = OTHER; note = 2'-O-methyluridine-3'-phosphorothioate
  modified_base 23: mod_base = OTHER; note = 2'-O-methylcytidine-3'-phosphate
  misc_feature 1..4: note = RNA
  misc_feature 5: note = DNA
  misc_feature 6..23: note = RNA
atctgcagtctagttgcagtttc

SEQ ID NO: 7811 - DNA, 23 bp, synthetic construct
  source 1..23: mol_type = other DNA
  modified_base 1: mod_base = OTHER; note = 2'-O-methyladenosine-3'-phosphorothioate
  modified_base 2: mod_base = OTHER; note = 2'-fluorouridine -3'-phosphorothioate
  modified_base 3: mod_base = OTHER; note = 2'-O-methylcytidine-3'-phosphate
  modified_base 4: mod_base = OTHER; note = 2'-O-methylcytidine-3'-phosphate
  modified_base 6: mod_base = OTHER; note = 2'-O-methylguanosine-3'-phosphate
  modified_base 7: mod_base = OTHER; note = Thymidine-glycol nucleic acid (GNA) S-Isomer
  modified_base 8: mod_base = OTHER; note = 2'-O-methyladenosine-3'-phosphate
  modified_base 9: mod_base = OTHER; note = 2'-O-methyladenosine-3'-phosphate
  modified_base 10: mod_base = OTHER; note = 2'-O-methylcytidine-3'-phosphate
  modified_base 11: mod_base = OTHER; note = 2'-O-methyluridine-3'-phosphate
  modified_base 12: mod_base = OTHER; note = 2'-O-methylguanosine-3'-phosphate
  modified_base 13: mod_base = OTHER; note = 2'-O-methyluridine-3'-phosphate
  modified_base 14: mod_base = OTHER; note = 2'-fluoroguanosine-3'-phosphate
  modified_base 15: mod_base = OTHER; note = 2'-O-methylcytidine-3'-phosphate
  modified_base 16: mod_base = OTHER; note = 2'-fluorouridine-3'-phosphate
  modified_base 17: mod_base = OTHER; note = 2'-O-methylguanosine-3'-phosphate
  modified_base 18: mod_base = OTHER; note = 2'-O-methyluridine-3'-phosphate
  modified_base 19: mod_base = OTHER; note = 2'-O-methyluridine-3'-phosphate
  modified_base 20: mod_base = OTHER; note = 2'-O-methylguanosine-3'-phosphate
  modified_base 21: mod_base = OTHER; note = 2'-O-methylcytidine-3'-phosphorothioate
  modified_base 22: mod_base = OTHER; note = 2'-O-methylcytidine-3'-phosphorothioate
  modified_base 23: mod_base = OTHER; note = 2'-O-methyluridine-3'-phosphate
  misc_feature 1..4: note = RNA
  misc_feature 5: note = DNA
  misc_feature 6: note = RNA
  misc_feature 7: note = DNA
  misc_feature 8..23: note = RNA
atccagtaactgtgctgttgcct

SEQ ID NO: 7812 - DNA, 23 bp, synthetic construct
  source 1..23: mol_type = other DNA
  modified_base 1: mod_base = OTHER; note = 2'-O-methyladenosine-3'-phosphorothioate
  modified_base 2: mod_base = OTHER; note = 2'-fluorouridine -3'-phosphorothioate
  modified_base 3: mod_base = OTHER; note = 2'-O-methylguanosine-3'-phosphate
  modified_base 4: mod_base = OTHER; note = 2'-O-methyluridine-3'-phosphate
  modified_base 6: mod_base = OTHER; note = 2'-O-methylcytidine-3'-phosphate
  modified_base 7: mod_base = OTHER; note = Adenosine-glycol nucleic acid (GNA)
  modified_base 8: mod_base = OTHER; note = 2'-O-methylguanosine-3'-phosphate
  modified_base 9: mod_base = OTHER; note = 2'-O-methyluridine-3'-phosphate
  modified_base 10: mod_base = OTHER; note = 2'-O-methyladenosine-3'-phosphate
  modified_base 11: mod_base = OTHER; note = 2'-O-methyladenosine-3'-phosphate
  modified_base 12: mod_base = OTHER; note = 2'-O-methylcytidine-3'-phosphate
  modified_base 13: mod_base = OTHER; note = 2'-O-methyluridine-3'-phosphate
  modified_base 14: mod_base = OTHER; note = 2'-fluoroguanosine-3'-phosphate
  modified_base 15: mod_base = OTHER; note = 2'-O-methyluridine-3'-phosphate
  modified_base 16: mod_base = OTHER; note = 2'-fluoroguanosine-3'-phosphate
  modified_base 17: mod_base = OTHER; note = 2'-O-methylcytidine-3'-phosphate
  modified_base 18: mod_base = OTHER; note = 2'-O-methyluridine-3'-phosphate
  modified_base 19: mod_base = OTHER; note = 2'-O-methylguanosine-3'-phosphate
  modified_base 20: mod_base = OTHER; note = 2'-O-methyluridine-3'-phosphate
  modified_base 21: mod_base = OTHER; note = 2'-O-methyluridine-3'-phosphorothioate
  modified_base 22: mod_base = OTHER; note = 2'-O-methylguanosine-3'-phosphorothioate
  modified_base 23: mod_base = OTHER; note = 2'-O-methylcytidine-3'-phosphate
  misc_feature 1..4: note = RNA
  misc_feature 5: note = DNA
  misc_feature 6..23: note = RNA
atgtccagtaactgtgctgttgc

SEQ ID NO: 7813 - DNA, 23 bp, synthetic construct
  source 1..23: mol_type = other DNA
  modified_base 1: mod_base = OTHER; note = 2'-O-methyladenosine-3'-phosphorothioate
  modified_base 2: mod_base = OTHER; note = 2'-fluoroguanosine-3'-phosphorothioate
  modified_base 3: mod_base = OTHER; note = 2'-O-methylguanosine-3'-phosphate
  modified_base 4: mod_base = OTHER; note = 2'-O-methyluridine-3'-phosphate
  modified_base 6: mod_base = OTHER; note = 2'-O-methylguanosine-3'-phosphate
  modified_base 7: mod_base = OTHER; note = Thymidine-glycol nucleic acid (GNA) S-Isomer
  modified_base 8: mod_base = OTHER; note = 2'-O-methylcytidine-3'-phosphate
  modified_base 9: mod_base = OTHER; note = 2'-O-methylcytidine-3'-phosphate
  modified_base 10: mod_base = OTHER; note = 2'-O-methyladenosine-3'-phosphate
  modified_base 11: mod_base = OTHER; note = 2'-O-methylguanosine-3'-phosphate
  modified_base 12: mod_base = OTHER; note = 2'-O-methyluridine-3'-phosphate
  modified_base 13: mod_base = OTHER; note = 2'-O-methyladenosine-3'-phosphate
  modified_base 14: mod_base = OTHER; note = 2'-fluoroadenosine-3'-phosphate
  modified_base 15: mod_base = OTHER; note = 2'-O-methylcytidine-3'-phosphate
  modified_base 16: mod_base = OTHER; note = 2'-fluorouridine-3'-phosphate
  modified_base 17: mod_base = OTHER; note = 2'-O-methylguanosine-3'-phosphate
  modified_base 18: mod_base = OTHER; note = 2'-O-methyluridine-3'-phosphate
  modified_base 19: mod_base = OTHER; note = 2'-O-methylguanosine-3'-phosphate
  modified_base 20: mod_base = OTHER; note = 2'-O-methylcytidine-3'-phosphate
  modified_base 21: mod_base = OTHER; note = 2'-O-methyluridine-3'-phosphorothioate
  modified_base 22: mod_base = OTHER; note = 2'-O-methylguanosine-3'-phosphorothioate
  modified_base 23: mod_base = OTHER; note = 2'-O-methyluridine-3'-phosphate
  misc_feature 1..4: note = RNA
  misc_feature 5: note = DNA
  misc_feature 6: note = RNA
  misc_feature 7: note = DNA
  misc_feature 8..23: note = RNA
aggttgtccagtaactgtgctgt

SEQ ID NO: 7814 - DNA, 23 bp, synthetic construct
  source 1..23: mol_type = other DNA
  modified_base 1: mod_base = OTHER; note = 2'-O-methyladenosine-3'-phosphorothioate
  modified_base 2: mod_base = OTHER; note = 2'-fluorouridine -3'-phosphorothioate
  modified_base 3: mod_base = OTHER; note = 2'-O-methylguanosine-3'-phosphate
  modified_base 4: mod_base = OTHER; note = 2'-O-methylguanosine-3'-phosphate
  modified_base 6: mod_base = OTHER; note = 2'-O-methylguanosine-3'-phosphate
  modified_base 7: mod_base = OTHER; note = Thymidine-glycol nucleic acid (GNA) S-Isomer
  modified_base 8: mod_base = OTHER; note = 2'-O-methylcytidine-3'-phosphate
  modified_base 9: mod_base = OTHER; note = 2'-O-methylcytidine-3'-phosphate
  modified_base 10: mod_base = OTHER; note = 2'-O-methyluridine-3'-phosphate
  modified_base 11: mod_base = OTHER; note = 2'-O-methylguanosine-3'-phosphate
  modified_base 12: mod_base = OTHER; note = 2'-O-methylcytidine-3'-phosphate
  modified_base 13: mod_base = OTHER; note = 2'-O-methyluridine-3'-phosphate
  modified_base 14: mod_base = OTHER; note = 2'-fluoroguanosine-3'-phosphate
  modified_base 15: mod_base = OTHER; note = 2'-O-methyluridine-3'-phosphate
  modified_base 16: mod_base = OTHER; note = 2'-fluoroguanosine-3'-phosphate
  modified_base 17: mod_base = OTHER; note = 2'-O-methyluridine-3'-phosphate
  modified_base 18: mod_base = OTHER; note = 2'-O-methylcytidine-3'-phosphate
  modified_base 19: mod_base = OTHER; note = 2'-O-methylcytidine-3'-phosphate
  modified_base 20: mod_base = OTHER; note = 2'-O-methyladenosine-3'-phosphate
  modified_base 21: mod_base = OTHER; note = 2'-O-methyladenosine-3'-phosphorothioate
  modified_base 22: mod_base = OTHER; note = 2'-O-methylguanosine-3'-phosphorothioate
  modified_base 23: mod_base = OTHER; note = 2'-O-methyladenosine-3'-phosphate
  misc_feature 1..4: note = RNA
  misc_feature 5: note = DNA
  misc_feature 6: note = RNA
  misc_feature 7: note = DNA
  misc_feature 8..23: note = RNA
atggtgtcctgctgtgtccaaga

SEQ ID NO: 7815 - DNA, 23 bp, synthetic construct
  source 1..23: mol_type = other DNA
  modified_base 1: mod_base = OTHER; note = 2'-O-methyladenosine-3'-phosphorothioate
  modified_base 2: mod_base = OTHER; note = 2'-fluoroguanosine-3'-phosphorothioate
  modified_base 3: mod_base = OTHER; note = 2'-O-methylcytidine-3'-phosphate
  modified_base 4: mod_base = OTHER; note = 2'-O-methyluridine-3'-phosphate
  modified_base 6: mod_base = OTHER; note = 2'-O-methylguanosine-3'-phosphate
  modified_base 7: mod_base = OTHER; note = Thymidine-glycol nucleic acid (GNA) S-Isomer
  modified_base 8: mod_base = OTHER; note = 2'-O-methylguanosine-3'-phosphate
  modified_base 9: mod_base = OTHER; note = 2'-O-methyluridine-3'-phosphate
  modified_base 10: mod_base = OTHER; note = 2'-O-methylcytidine-3'-phosphate
  modified_base 11: mod_base = OTHER; note = 2'-O-methylcytidine-3'-phosphate
  modified_base 12: mod_base = OTHER; note = 2'-O-methyluridine-3'-phosphate
  modified_base 13: mod_base = OTHER; note = 2'-O-methylguanosine-3'-phosphate
  modified_base 14: mod_base = OTHER; note = 2'-fluorocytidine-3'-phosphate
  modified_base 15: mod_base = OTHER; note = 2'-O-methyluridine-3'-phosphate
  modified_base 16: mod_base = OTHER; note = 2'-fluoroguanosine-3'-phosphate
  modified_base 17: mod_base = OTHER; note = 2'-O-methyluridine-3'-phosphate
  modified_base 18: mod_base = OTHER; note = 2'-O-methylguanosine-3'-phosphate
  modified_base 19: mod_base = OTHER; note = 2'-O-methyluridine-3'-phosphate
  modified_base 20: mod_base = OTHER; note = 2'-O-methylcytidine-3'-phosphate
  modified_base 21: mod_base = OTHER; note = 2'-O-methylcytidine-3'-phosphorothioate
  modified_base 22: mod_base = OTHER; note = 2'-O-methyladenosine-3'-phosphorothioate
  modified_base 23: mod_base = OTHER; note = 2'-O-methyladenosine-3'-phosphate
  misc_feature 1..4: note = RNA
  misc_feature 5: note = DNA
  misc_feature 6: note = RNA
  misc_feature 7: note = DNA
  misc_feature 8..23: note = RNA
agctggtgtcctgctgtgtccaa

SEQ ID NO: 7816 - DNA, 23 bp, synthetic construct
  source 1..23: mol_type = other DNA
  modified_base 1: mod_base = OTHER; note = 2'-O-methyladenosine-3'-phosphorothioate
  modified_base 2: mod_base = OTHER; note = 2'-fluoroguanosine-3'-phosphorothioate
  modified_base 3: mod_base = OTHER; note = 2'-O-methylcytidine-3'-phosphate
  modified_base 4: mod_base = OTHER; note = 2'-O-methyluridine-3'-phosphate
  modified_base 6: mod_base = OTHER; note = 2'-O-methylcytidine-3'-phosphate
  modified_base 7: mod_base = OTHER; note = Thymidine-glycol nucleic acid (GNA) S-Isomer
  modified_base 8: mod_base = OTHER; note = 2'-O-methylguanosine-3'-phosphate
  modified_base 9: mod_base = OTHER; note = 2'-O-methylguanosine-3'-phosphate
  modified_base 10: mod_base = OTHER; note = 2'-O-methyluridine-3'-phosphate
  modified_base 11: mod_base = OTHER; note = 2'-O-methylguanosine-3'-phosphate
  modified_base 12: mod_base = OTHER; note = 2'-O-methyluridine-3'-phosphate
  modified_base 13: mod_base = OTHER; note = 2'-O-methylcytidine-3'-phosphate
  modified_base 14: mod_base = OTHER; note = 2'-fluorocytidine-3'-phosphate
  modified_base 15: mod_base = OTHER; note = 2'-O-methyluridine-3'-phosphate
  modified_base 16: mod_base = OTHER; note = 2'-fluoroguanosine-3'-phosphate
  modified_base 17: mod_base = OTHER; note = 2'-O-methylcytidine-3'-phosphate
  modified_base 18: mod_base = OTHER; note = 2'-O-methyluridine-3'-phosphate
  modified_base 19: mod_base = OTHER; note = 2'-O-methylguanosine-3'-phosphate
  modified_base 20: mod_base = OTHER; note = 2'-O-methyluridine-3'-phosphate
  modified_base 21: mod_base = OTHER; note = 2'-O-methylguanosine-3'-phosphorothioate
  modified_base 22: mod_base = OTHER; note = 2'-O-methyluridine-3'-phosphorothioate
  modified_base 23: mod_base = OTHER; note = 2'-O-methylcytidine-3'-phosphate
  misc_feature 1..4: note = RNA
  misc_feature 5: note = DNA
  misc_feature 6: note = RNA
  misc_feature 7: note = DNA
  misc_feature 8..23: note = RNA
agctgctggtgtcctgctgtgtc

SEQ ID NO: 7817 - DNA, 23 bp, synthetic construct
  source 1..23: mol_type = other DNA
  modified_base 1: mod_base = OTHER; note = 2'-O-methyladenosine-3'-phosphorothioate
  modified_base 2: mod_base = OTHER; note = 2'-fluorouridine -3'-phosphorothioate
  modified_base 3: mod_base = OTHER; note = 2'-O-methyladenosine-3'-phosphate
  modified_base 4: mod_base = OTHER; note = 2'-O-methylguanosine-3'-phosphate
  modified_base 6: mod_base = OTHER; note = 2'-O-methyladenosine-3'-phosphate
  modified_base 7: mod_base = OTHER; note = Adenosine-glycol nucleic acid (GNA)
  modified_base 8: mod_base = OTHER; note = 2'-O-methylguanosine-3'-phosphate
  modified_base 9: mod_base = OTHER; note = 2'-O-methylguanosine-3'-phosphate
  modified_base 10: mod_base = OTHER; note = 2'-O-methylguanosine-3'-phosphate
  modified_base 11: mod_base = OTHER; note = 2'-O-methylcytidine-3'-phosphate
  modified_base 12: mod_base = OTHER; note = 2'-O-methyluridine-3'-phosphate
  modified_base 13: mod_base = OTHER; note = 2'-O-methylguanosine-3'-phosphate
  modified_base 14: mod_base = OTHER; note = 2'-fluorocytidine-3'-phosphate
  modified_base 15: mod_base = OTHER; note = 2'-O-methyluridine-3'-phosphate
  modified_base 16: mod_base = OTHER; note = 2'-fluoroguanosine-3'-phosphate
  modified_base 17: mod_base = OTHER; note = 2'-O-methylguanosine-3'-phosphate
  modified_base 18: mod_base = OTHER; note = 2'-O-methyluridine-3'-phosphate
  modified_base 19: mod_base = OTHER; note = 2'-O-methylguanosine-3'-phosphate
  modified_base 20: mod_base = OTHER; note = 2'-O-methyluridine-3'-phosphate
  modified_base 21: mod_base = OTHER; note = 2'-O-methylcytidine-3'-phosphorothioate
  modified_base 22: mod_base = OTHER; note = 2'-O-methylcytidine-3'-phosphorothioate
  modified_base 23: mod_base = OTHER; note = 2'-O-methyluridine-3'-phosphate
  misc_feature 1..4: note = RNA
  misc_feature 5: note = DNA
  misc_feature 6..23: note = RNA
ataggaagggctgctggtgtcct

SEQ ID NO: 7818 - DNA, 23 bp, synthetic construct
  source 1..23: mol_type = other DNA
  modified_base 1: mod_base = OTHER; note = 2'-O-methyladenosine-3'-phosphorothioate
  modified_base 2: mod_base = OTHER; note = 2'-fluoroguanosine-3'-phosphorothioate
  modified_base 3: mod_base = OTHER; note = 2'-O-methylcytidine-3'-phosphate
  modified_base 4: mod_base = OTHER; note = 2'-O-methyluridine-3'-phosphate
  modified_base 6: mod_base = OTHER; note = 2'-O-methyluridine-3'-phosphate
  modified_base 7: mod_base = OTHER; note = Adenosine-glycol nucleic acid (GNA)
  modified_base 8: mod_base = OTHER; note = 2'-O-methylguanosine-3'-phosphate
  modified_base 9: mod_base = OTHER; note = 2'-O-methylguanosine-3'-phosphate
  modified_base 10: mod_base = OTHER; note = 2'-O-methyladenosine-3'-phosphate
  modified_base 11: mod_base = OTHER; note = 2'-O-methyladenosine-3'-phosphate
  modified_base 12: mod_base = OTHER; note = 2'-O-methylguanosine-3'-phosphate
  modified_base 13: mod_base = OTHER; note = 2'-O-methylguanosine-3'-phosphate
  modified_base 14: mod_base = OTHER; note = 2'-fluoroguanosine-3'-phosphate
  modified_base 15: mod_base = OTHER; note = 2'-O-methylcytidine-3'-phosphate
  modified_base 16: mod_base = OTHER; note = 2'-fluorouridine-3'-phosphate
  modified_base 17: mod_base = OTHER; note = 2'-O-methylguanosine-3'-phosphate
  modified_base 18: mod_base = OTHER; note = 2'-O-methylcytidine-3'-phosphate
  modified_base 19: mod_base = OTHER; note = 2'-O-methyluridine-3'-phosphate
  modified_base 20: mod_base = OTHER; note = 2'-O-methylguanosine-3'-phosphate
  modified_base 21: mod_base = OTHER; note = 2'-O-methylguanosine-3'-phosphorothioate
  modified_base 22: mod_base = OTHER; note = 2'-O-methyluridine-3'-phosphorothioate
  modified_base 23: mod_base = OTHER; note = 2'-O-methylguanosine-3'-phosphate
  misc_feature 1..4: note = RNA
  misc_feature 5: note = DNA
  misc_feature 6..23: note = RNA
agctctaggaagggctgctggtg

SEQ ID NO: 7819 - DNA, 23 bp, synthetic construct
  source 1..23: mol_type = other DNA
  modified_base 1: mod_base = OTHER; note = 2'-O-methyladenosine-3'-phosphorothioate
  modified_base 2: mod_base = OTHER; note = 2'-fluoroadenosine-3'-phosphorothioate
  modified_base 3: mod_base = OTHER; note = 2'-O-methylguanosine-3'-phosphate
  modified_base 4: mod_base = OTHER; note = 2'-O-methylcytidine-3'-phosphate
  modified_base 6: mod_base = OTHER; note = 2'-O-methylcytidine-3'-phosphate
  modified_base 7: mod_base = OTHER; note = Thymidine-glycol nucleic acid (GNA) S-Isomer
  modified_base 8: mod_base = OTHER; note = 2'-O-methyladenosine-3'-phosphate
  modified_base 9: mod_base = OTHER; note = 2'-O-methylguanosine-3'-phosphate
  modified_base 10: mod_base = OTHER; note = 2'-O-methylguanosine-3'-phosphate
  modified_base 11: mod_base = OTHER; note = 2'-O-methyladenosine-3'-phosphate
  modified_base 12: mod_base = OTHER; note = 2'-O-methyladenosine-3'-phosphate
  modified_base 13: mod_base = OTHER; note = 2'-O-methylguanosine-3'-phosphate
  modified_base 14: mod_base = OTHER; note = 2'-fluoroguanosine-3'-phosphate
  modified_base 15: mod_base = OTHER; note = 2'-O-methylguanosine-3'-phosphate
  modified_base 16: mod_base = OTHER; note = 2'-fluorocytidine-3'-phosphate
  modified_base 17: mod_base = OTHER; note = 2'-O-methyluridine-3'-phosphate
  modified_base 18: mod_base = OTHER; note = 2'-O-methylguanosine-3'-phosphate
  modified_base 19: mod_base = OTHER; note = 2'-O-methylcytidine-3'-phosphate
  modified_base 20: mod_base = OTHER; note = 2'-O-methyluridine-3'-phosphate
  modified_base 21: mod_base = OTHER; note = 2'-O-methylguanosine-3'-phosphorothioate
  modified_base 22: mod_base = OTHER; note = 2'-O-methylguanosine-3'-phosphorothioate
  modified_base 23: mod_base = OTHER; note = 2'-O-methyluridine-3'-phosphate
  misc_feature 1..4: note = RNA
  misc_feature 5: note = DNA
  misc_feature 6: note = RNA
  misc_feature 7: note = DNA
  misc_feature 8..23: note = RNA
aagctctaggaagggctgctggt

SEQ ID NO: 7820 - DNA, 23 bp, synthetic construct
  source 1..23: mol_type = other DNA
  modified_base 1: mod_base = OTHER; note = 2'-O-methyladenosine-3'-phosphorothioate
  modified_base 2: mod_base = OTHER; note = 2'-fluorouridine -3'-phosphorothioate
  modified_base 3: mod_base = OTHER; note = 2'-O-methyladenosine-3'-phosphate
  modified_base 4: mod_base = OTHER; note = 2'-O-methyladenosine-3'-phosphate
  modified_base 6: mod_base = OTHER; note = 2'-O-methylcytidine-3'-phosphate
  modified_base 7: mod_base = OTHER; note = Thymidine-glycol nucleic acid (GNA) S-Isomer
  modified_base 8: mod_base = OTHER; note = 2'-O-methylcytidine-3'-phosphate
  modified_base 9: mod_base = OTHER; note = 2'-O-methyluridine-3'-phosphate
  modified_base 10: mod_base = OTHER; note = 2'-O-methyladenosine-3'-phosphate
  modified_base 11: mod_base = OTHER; note = 2'-O-methylguanosine-3'-phosphate
  modified_base 12: mod_base = OTHER; note = 2'-O-methylguanosine-3'-phosphate
  modified_base 13: mod_base = OTHER; note = 2'-O-methyladenosine-3'-phosphate
  modified_base 14: mod_base = OTHER; note = 2'-fluoroadenosine-3'-phosphate
  modified_base 15: mod_base = OTHER; note = 2'-O-methylguanosine-3'-phosphate
  modified_base 16: mod_base = OTHER; note = 2'-fluoroguanosine-3'-phosphate
  modified_base 17: mod_base = OTHER; note = 2'-O-methylguanosine-3'-phosphate
  modified_base 18: mod_base = OTHER; note = 2'-O-methylcytidine-3'-phosphate
  modified_base 19: mod_base = OTHER; note = 2'-O-methyluridine-3'-phosphate
  modified_base 20: mod_base = OTHER; note = 2'-O-methylguanosine-3'-phosphate
  modified_base 21: mod_base = OTHER; note = 2'-O-methylcytidine-3'-phosphorothioate
  modified_base 22: mod_base = OTHER; note = 2'-O-methyluridine-3'-phosphorothioate
  modified_base 23: mod_base = OTHER; note = 2'-O-methylguanosine-3'-phosphate
  misc_feature 1..4: note = RNA
  misc_feature 5: note = DNA
  misc_feature 6: note = RNA
  misc_feature 7: note = DNA
  misc_feature 8..23: note = RNA
ataagctctaggaagggctgctg

SEQ ID NO: 7821 - DNA, 23 bp, synthetic construct
  source 1..23: mol_type = other DNA
  modified_base 1: mod_base = OTHER; note = 2'-O-methyladenosine-3'-phosphorothioate
  modified_base 2: mod_base = OTHER; note = 2'-fluoroguanosine-3'-phosphorothioate
  modified_base 3: mod_base = OTHER; note = 2'-O-methyladenosine-3'-phosphate
  modified_base 4: mod_base = OTHER; note = 2'-O-methyluridine-3'-phosphate
  modified_base 6: mod_base = OTHER; note = 2'-O-methyluridine-3'-phosphate
  modified_base 7: mod_base = OTHER; note = Thymidine-glycol nucleic acid (GNA) S-Isomer
  modified_base 8: mod_base = OTHER; note = 2'-O-methyladenosine-3'-phosphate
  modified_base 9: mod_base = OTHER; note = 2'-O-methyladenosine-3'-phosphate
  modified_base 10: mod_base = OTHER; note = 2'-O-methylguanosine-3'-phosphate
  modified_base 11: mod_base = OTHER; note = 2'-O-methylcytidine-3'-phosphate
  modified_base 12: mod_base = OTHER; note = 2'-O-methyluridine-3'-phosphate
  modified_base 13: mod_base = OTHER; note = 2'-O-methylcytidine-3'-phosphate
  modified_base 14: mod_base = OTHER; note = 2'-fluorouridine-3'-phosphate
  modified_base 15: mod_base = OTHER; note = 2'-O-methyladenosine-3'-phosphate
  modified_base 16: mod_base = OTHER; note = 2'-fluoroguanosine-3'-phosphate
  modified_base 17: mod_base = OTHER; note = 2'-O-methylguanosine-3'-phosphate
  modified_base 18: mod_base = OTHER; note = 2'-O-methyladenosine-3'-phosphate
  modified_base 19: mod_base = OTHER; note = 2'-O-methyladenosine-3'-phosphate
  modified_base 20: mod_base = OTHER; note = 2'-O-methylguanosine-3'-phosphate
  modified_base 21: mod_base = OTHER; note = 2'-O-methylguanosine-3'-phosphorothioate
  modified_base 22: mod_base = OTHER; note = 2'-O-methylguanosine-3'-phosphorothioate
  modified_base 23: mod_base = OTHER; note = 2'-O-methylcytidine-3'-phosphate
  misc_feature 1..4: note = RNA
  misc_feature 5: note = DNA
  misc_feature 6: note = RNA
  misc_feature 7: note = DNA
  misc_feature 8..23: note = RNA
agatcttaagctctaggaagggc

SEQ ID NO: 7822 - DNA, 23 bp, synthetic construct
  source 1..23: mol_type = other DNA
  modified_base 1: mod_base = OTHER; note = 2'-O-methyladenosine-3'-phosphorothioate
  modified_base 2: mod_base = OTHER; note = 2'-fluoroguanosine-3'-phosphorothioate
  modified_base 3: mod_base = OTHER; note = 2'-O-methyluridine-3'-phosphate
  modified_base 4: mod_base = OTHER; note = 2'-O-methyluridine-3'-phosphate
  modified_base 6: mod_base = OTHER; note = 2'-O-methylcytidine-3'-phosphate
  modified_base 7: mod_base = OTHER; note = Thymidine-glycol nucleic acid (GNA) S-Isomer
  modified_base 8: mod_base = OTHER; note = 2'-O-methylguanosine-3'-phosphate
  modified_base 9: mod_base = OTHER; note = 2'-O-methylguanosine-3'-phosphate
  modified_base 10: mod_base = OTHER; note = 2'-O-methyladenosine-3'-phosphate
  modified_base 11: mod_base = OTHER; note = 2'-O-methyladenosine-3'-phosphate
  modified_base 12: mod_base = OTHER; note = 2'-O-methylguanosine-3'-phosphate
  modified_base 13: mod_base = OTHER; note = 2'-O-methyluridine-3'-phosphate
  modified_base 14: mod_base = OTHER; note = 2'-fluorocytidine-3'-phosphate
  modified_base 15: mod_base = OTHER; note = 2'-O-methyluridine-3'-phosphate
  modified_base 16: mod_base = OTHER; note = 2'-fluoroadenosine-3'-phosphate
  modified_base 17: mod_base = OTHER; note = 2'-O-methylcytidine-3'-phosphate
  modified_base 18: mod_base = OTHER; note = 2'-O-methylguanosine-3'-phosphate
  modified_base 19: mod_base = OTHER; note = 2'-O-methyluridine-3'-phosphate
  modified_base 20: mod_base = OTHER; note = 2'-O-methyladenosine-3'-phosphate
  modified_base 21: mod_base = OTHER; note = 2'-O-methyladenosine-3'-phosphorothioate
  modified_base 22: mod_base = OTHER; note = 2'-O-methyluridine-3'-phosphorothioate
  modified_base 23: mod_base = OTHER; note = 2'-O-methylguanosine-3'-phosphate
  misc_feature 1..4: note = RNA
  misc_feature 5: note = DNA
  misc_feature 6: note = RNA
  misc_feature 7: note = DNA
  misc_feature 8..23: note = RNA
agttcctggaagtctacgtaatg

SEQ ID NO: 7823 - DNA, 23 bp, synthetic construct
  source 1..23: mol_type = other DNA
  modified_base 1: mod_base = OTHER; note = 2'-O-methyladenosine-3'-phosphorothioate
  modified_base 2: mod_base = OTHER; note = 2'-fluoroadenosine-3'-phosphorothioate
  modified_base 3: mod_base = OTHER; note = 2'-O-methyluridine-3'-phosphate
  modified_base 4: mod_base = OTHER; note = 2'-O-methylcytidine-3'-phosphate
  modified_base 6: mod_base = OTHER; note = 2'-O-methylcytidine-3'-phosphate
  modified_base 7: mod_base = OTHER; note = Adenosine-glycol nucleic acid (GNA)
  modified_base 8: mod_base = OTHER; note = 2'-O-methylguanosine-3'-phosphate
  modified_base 9: mod_base = OTHER; note = 2'-O-methyluridine-3'-phosphate
  modified_base 10: mod_base = OTHER; note = 2'-O-methyluridine-3'-phosphate
  modified_base 11: mod_base = OTHER; note = 2'-O-methylcytidine-3'-phosphate
  modified_base 12: mod_base = OTHER; note = 2'-O-methylcytidine-3'-phosphate
  modified_base 13: mod_base = OTHER; note = 2'-O-methyluridine-3'-phosphate
  modified_base 14: mod_base = OTHER; note = 2'-fluoroguanosine-3'-phosphate
  modified_base 15: mod_base = OTHER; note = 2'-O-methylguanosine-3'-phosphate
  modified_base 16: mod_base = OTHER; note = 2'-fluoroadenosine-3'-phosphate
  modified_base 17: mod_base = OTHER; note = 2'-O-methyladenosine-3'-phosphate
  modified_base 18: mod_base = OTHER; note = 2'-O-methylguanosine-3'-phosphate
  modified_base 19: mod_base = OTHER; note = 2'-O-methyluridine-3'-phosphate
  modified_base 20: mod_base = OTHER; note = 2'-O-methylcytidine-3'-phosphate
  modified_base 21: mod_base = OTHER; note = 2'-O-methyluridine-3'-phosphorothioate
  modified_base 22: mod_base = OTHER; note = 2'-O-methyladenosine-3'-phosphorothioate
  modified_base 23: mod_base = OTHER; note = 2'-O-methylcytidine-3'-phosphate
  misc_feature 1..4: note = RNA
  misc_feature 5: note = DNA
  misc_feature 6..23: note = RNA
aatcccagttcctggaagtctac

SEQ ID NO: 7824 - DNA, 23 bp, synthetic construct
  source 1..23: mol_type = other DNA
  modified_base 1: mod_base = OTHER; note = 2'-O-methyladenosine-3'-phosphorothioate
  modified_base 2: mod_base = OTHER; note = 2'-fluorouridine -3'-phosphorothioate
  modified_base 3: mod_base = OTHER; note = 2'-O-methylguanosine-3'-phosphate
  modified_base 4: mod_base = OTHER; note = 2'-O-methylcytidine-3'-phosphate
  modified_base 6: mod_base = OTHER; note = 2'-O-methylguanosine-3'-phosphate
  modified_base 7: mod_base = OTHER; note = Thymidine-glycol nucleic acid (GNA) S-Isomer
  modified_base 8: mod_base = OTHER; note = 2'-O-methyladenosine-3'-phosphate
  modified_base 9: mod_base = OTHER; note = 2'-O-methyladenosine-3'-phosphate
  modified_base 10: mod_base = OTHER; note = 2'-O-methyluridine-3'-phosphate
  modified_base 11: mod_base = OTHER; note = 2'-O-methyluridine-3'-phosphate
  modified_base 12: mod_base = OTHER; note = 2'-O-methylcytidine-3'-phosphate
  modified_base 13: mod_base = OTHER; note = 2'-O-methyladenosine-3'-phosphate
  modified_base 14: mod_base = OTHER; note = 2'-fluoroguanosine-3'-phosphate
  modified_base 15: mod_base = OTHER; note = 2'-O-methylcytidine-3'-phosphate
  modified_base 16: mod_base = OTHER; note = 2'-fluorouridine-3'-phosphate
  modified_base 17: mod_base = OTHER; note = 2'-O-methylguanosine-3'-phosphate
  modified_base 18: mod_base = OTHER; note = 2'-O-methylguanosine-3'-phosphate
  modified_base 19: mod_base = OTHER; note = 2'-O-methyluridine-3'-phosphate
  modified_base 20: mod_base = OTHER; note = 2'-O-methyladenosine-3'-phosphate
  modified_base 21: mod_base = OTHER; note = 2'-O-methylcytidine-3'-phosphorothioate
  modified_base 22: mod_base = OTHER; note = 2'-O-methylcytidine-3'-phosphorothioate
  modified_base 23: mod_base = OTHER; note = 2'-O-methylcytidine-3'-phosphate
  misc_feature 1..4: note = RNA
  misc_feature 5: note = DNA
  misc_feature 6: note = RNA
  misc_feature 7: note = DNA
  misc_feature 8..23: note = RNA
atgcagtaattcagctggtaccc

SEQ ID NO: 7825 - DNA, 23 bp, synthetic construct
  source 1..23: mol_type = other DNA
  modified_base 1: mod_base = OTHER; note = 2'-O-methyladenosine-3'-phosphorothioate
  modified_base 2: mod_base = OTHER; note = 2'-fluoroadenosine-3'-phosphorothioate
  modified_base 3: mod_base = OTHER; note = 2'-O-methylcytidine-3'-phosphate
  modified_base 4: mod_base = OTHER; note = 2'-O-methyluridine-3'-phosphate
  modified_base 6: mod_base = OTHER; note = 2'-O-methylcytidine-3'-phosphate
  modified_base 7: mod_base = OTHER; note = Adenosine-glycol nucleic acid (GNA)
  modified_base 8: mod_base = OTHER; note = 2'-O-methylguanosine-3'-phosphate
  modified_base 9: mod_base = OTHER; note = 2'-O-methyluridine-3'-phosphate
  modified_base 10: mod_base = OTHER; note = 2'-O-methyladenosine-3'-phosphate
  modified_base 11: mod_base = OTHER; note = 2'-O-methyladenosine-3'-phosphate
  modified_base 12: mod_base = OTHER; note = 2'-O-methyluridine-3'-phosphate
  modified_base 13: mod_base = OTHER; note = 2'-O-methyluridine-3'-phosphate
  modified_base 14: mod_base = OTHER; note = 2'-fluorocytidine-3'-phosphate
  modified_base 15: mod_base = OTHER; note = 2'-O-methyladenosine-3'-phosphate
  modified_base 16: mod_base = OTHER; note = 2'-fluoroguanosine-3'-phosphate
  modified_base 17: mod_base = OTHER; note = 2'-O-methylcytidine-3'-phosphate
  modified_base 18: mod_base = OTHER; note = 2'-O-methyluridine-3'-phosphate
  modified_base 19: mod_base = OTHER; note = 2'-O-methylguanosine-3'-phosphate
  modified_base 20: mod_base = OTHER; note = 2'-O-methylguanosine-3'-phosphate
  modified_base 21: mod_base = OTHER; note = 2'-O-methyluridine-3'-phosphorothioate
  modified_base 22: mod_base = OTHER; note = 2'-O-methyladenosine-3'-phosphorothioate
  modified_base 23: mod_base = OTHER; note = 2'-O-methylcytidine-3'-phosphate
  misc_feature 1..4: note = RNA
  misc_feature 5: note = DNA
  misc_feature 6..23: note = RNA
aactgcagtaattcagctggtac

SEQ ID NO: 7826 - DNA, 23 bp, synthetic construct
  source 1..23: mol_type = other DNA
  modified_base 1: mod_base = OTHER; note = 2'-O-methyladenosine-3'-phosphorothioate
  modified_base 2: mod_base = OTHER; note = 2'-fluorouridine -3'-phosphorothioate
  modified_base 3: mod_base = OTHER; note = 2'-O-methylguanosine-3'-phosphate
  modified_base 4: mod_base = OTHER; note = 2'-O-methylcytidine-3'-phosphate
  modified_base 6: mod_base = OTHER; note = 2'-O-methylcytidine-3'-phosphate
  modified_base 7: mod_base = OTHER; note = Adenosine-glycol nucleic acid (GNA)
  modified_base 8: mod_base = OTHER; note = 2'-O-methylcytidine-3'-phosphate
  modified_base 9: mod_base = OTHER; note = 2'-O-methyluridine-3'-phosphate
  modified_base 10: mod_base = OTHER; note = 2'-O-methylguanosine-3'-phosphate
  modified_base 11: mod_base = OTHER; note = 2'-O-methylcytidine-3'-phosphate
  modified_base 12: mod_base = OTHER; note = 2'-O-methyladenosine-3'-phosphate
  modified_base 13: mod_base = OTHER; note = 2'-O-methylguanosine-3'-phosphate
  modified_base 14: mod_base = OTHER; note = 2'-fluorouridine-3'-phosphate
  modified_base 15: mod_base = OTHER; note = 2'-O-methyladenosine-3'-phosphate
  modified_base 16: mod_base = OTHER; note = 2'-fluoroadenosine-3'-phosphate
  modified_base 17: mod_base = OTHER; note = 2'-O-methyluridine-3'-phosphate
  modified_base 18: mod_base = OTHER; note = 2'-O-methyluridine-3'-phosphate
  modified_base 19: mod_base = OTHER; note = 2'-O-methylcytidine-3'-phosphate
  modified_base 20: mod_base = OTHER; note = 2'-O-methyladenosine-3'-phosphate
  modified_base 21: mod_base = OTHER; note = 2'-O-methylguanosine-3'-phosphorothioate
  modified_base 22: mod_base = OTHER; note = 2'-O-methylcytidine-3'-phosphorothioate
  modified_base 23: mod_base = OTHER; note = 2'-O-methyluridine-3'-phosphate
  misc_feature 1..4: note = RNA
  misc_feature 5: note = DNA
  misc_feature 6..23: note = RNA
atgcccactgcagtaattcagct

SEQ ID NO: 7827 - DNA, 23 bp, synthetic construct
  source 1..23: mol_type = other DNA
  modified_base 1: mod_base = OTHER; note = 2'-O-methyladenosine-3'-phosphorothioate
  modified_base 2: mod_base = OTHER; note = 2'-fluoroadenosine-3'-phosphorothioate
  modified_base 3: mod_base = OTHER; note = 2'-O-methylguanosine-3'-phosphate
  modified_base 4: mod_base = OTHER; note = 2'-O-methylguanosine-3'-phosphate
  modified_base 6: mod_base = OTHER; note = 2'-O-methylcytidine-3'-phosphate
  modified_base 7: mod_base = OTHER; note = Adenosine-glycol nucleic acid (GNA)
  modified_base 8: mod_base = OTHER; note = 2'-O-methylcytidine-3'-phosphate
  modified_base 9: mod_base = OTHER; note = 2'-O-methyluridine-3'-phosphate
  modified_base 10: mod_base = OTHER; note = 2'-O-methylguanosine-3'-phosphate
  modified_base 11: mod_base = OTHER; note = 2'-O-methylcytidine-3'-phosphate
  modified_base 12: mod_base = OTHER; note = 2'-O-methylcytidine-3'-phosphate
  modified_base 13: mod_base = OTHER; note = 2'-O-methylcytidine-3'-phosphate
  modified_base 14: mod_base = OTHER; note = 2'-fluoroadenosine-3'-phosphate
  modified_base 15: mod_base = OTHER; note = 2'-O-methylcytidine-3'-phosphate
  modified_base 16: mod_base = OTHER; note = 2'-fluorouridine-3'-phosphate
  modified_base 17: mod_base = OTHER; note = 2'-O-methylguanosine-3'-phosphate
  modified_base 18: mod_base = OTHER; note = 2'-O-methylcytidine-3'-phosphate
  modified_base 19: mod_base = OTHER; note = 2'-O-methyladenosine-3'-phosphate
  modified_base 20: mod_base = OTHER; note = 2'-O-methylguanosine-3'-phosphate
  modified_base 21: mod_base = OTHER; note = 2'-O-methyluridine-3'-phosphorothioate
  modified_base 22: mod_base = OTHER; note = 2'-O-methyladenosine-3'-phosphorothioate
  modified_base 23: mod_base = OTHER; note = 2'-O-methyladenosine-3'-phosphate
  misc_feature 1..4: note = RNA
  misc_feature 5: note = DNA
  misc_feature 6..23: note = RNA
aagggcactgcccactgcagtaa

SEQ ID NO: 7828 - DNA, 23 bp, synthetic construct
  source 1..23: mol_type = other DNA
  modified_base 1: mod_base = OTHER; note = 2'-O-methyladenosine-3'-phosphorothioate
  modified_base 2: mod_base = OTHER; note = 2'-fluoroguanosine-3'-phosphorothioate
  modified_base 3: mod_base = OTHER; note = 2'-O-methyladenosine-3'-phosphate
  modified_base 4: mod_base = OTHER; note = 2'-O-methyladenosine-3'-phosphate
  modified_base 6: mod_base = OTHER; note = 2'-O-methylguanosine-3'-phosphate
  modified_base 7: mod_base = OTHER; note = Adenosine-glycol nucleic acid (GNA)
  modified_base 8: mod_base = OTHER; note = 2'-O-methylguanosine-3'-phosphate
  modified_base 9: mod_base = OTHER; note = 2'-O-methylguanosine-3'-phosphate
  modified_base 10: mod_base = OTHER; note = 2'-O-methylcytidine-3'-phosphate
  modified_base 11: mod_base = OTHER; note = 2'-O-methyladenosine-3'-phosphate
  modified_base 12: mod_base = OTHER; note = 2'-O-methylguanosine-3'-phosphate
  modified_base 13: mod_base = OTHER; note = 2'-O-methylcytidine-3'-phosphate
  modified_base 14: mod_base = OTHER; note = 2'-fluoroadenosine-3'-phosphate
  modified_base 15: mod_base = OTHER; note = 2'-O-methyladenosine-3'-phosphate
  modified_base 16: mod_base = OTHER; note = 2'-fluorouridine-3'-phosphate
  modified_base 17: mod_base = OTHER; note = 2'-O-methylguanosine-3'-phosphate
  modified_base 18: mod_base = OTHER; note = 2'-O-methylcytidine-3'-phosphate
  modified_base 19: mod_base = OTHER; note = 2'-O-methylcytidine-3'-phosphate
  modified_base 20: mod_base = OTHER; note = 2'-O-methyluridine-3'-phosphate
  modified_base 21: mod_base = OTHER; note = 2'-O-methylguanosine-3'-phosphorothioate
  modified_base 22: mod_base = OTHER; note = 2'-O-methylguanosine-3'-phosphorothioate
  modified_base 23: mod_base = OTHER; note = 2'-O-methylguanosine-3'-phosphate
  misc_feature 1..4: note = RNA
  misc_feature 5: note = DNA
  misc_feature 6..23: note = RNA
agaaagaggcagcaatgcctggg

SEQ ID NO: 7829 - DNA, 23 bp, synthetic construct
  source 1..23: mol_type = other DNA
  modified_base 1: mod_base = OTHER; note = 2'-O-methyladenosine-3'-phosphorothioate
  modified_base 2: mod_base = OTHER; note = 2'-fluoroadenosine-3'-phosphorothioate
  modified_base 3: mod_base = OTHER; note = 2'-O-methyladenosine-3'-phosphate
  modified_base 4: mod_base = OTHER; note = 2'-O-methyluridine-3'-phosphate
  modified_base 6: mod_base = OTHER; note = 2'-O-methylguanosine-3'-phosphate
  modified_base 7: mod_base = OTHER; note = Adenosine-glycol nucleic acid (GNA)
  modified_base 8: mod_base = OTHER; note = 2'-O-methyladenosine-3'-phosphate
  modified_base 9: mod_base = OTHER; note = 2'-O-methyladenosine-3'-phosphate
  modified_base 10: mod_base = OTHER; note = 2'-O-methylguanosine-3'-phosphate
  modified_base 11: mod_base = OTHER; note = 2'-O-methyladenosine-3'-phosphate
  modified_base 12: mod_base = OTHER; note = 2'-O-methylguanosine-3'-phosphate
  modified_base 13: mod_base = OTHER; note = 2'-O-methylguanosine-3'-phosphate
  modified_base 14: mod_base = OTHER; note = 2'-fluorocytidine-3'-phosphate
  modified_base 15: mod_base = OTHER; note = 2'-O-methyladenosine-3'-phosphate
  modified_base 16: mod_base = OTHER; note = 2'-fluoroguanosine-3'-phosphate
  modified_base 17: mod_base = OTHER; note = 2'-O-methylcytidine-3'-phosphate
  modified_base 18: mod_base = OTHER; note = 2'-O-methyladenosine-3'-phosphate
  modified_base 19: mod_base = OTHER; note = 2'-O-methyladenosine-3'-phosphate
  modified_base 20: mod_base = OTHER; note = 2'-O-methyluridine-3'-phosphate
  modified_base 21: mod_base = OTHER; note = 2'-O-methylguanosine-3'-phosphorothioate
  modified_base 22: mod_base = OTHER; note = 2'-O-methylcytidine-3'-phosphorothioate
  modified_base 23: mod_base = OTHER; note = 2'-O-methylcytidine-3'-phosphate
  misc_feature 1..4: note = RNA
  misc_feature 5: note = DNA
  misc_feature 6..23: note = RNA
aaatggaaagaggcagcaatgcc

SEQ ID NO: 7830 - DNA, 23 bp, synthetic construct
  source 1..23: mol_type = other DNA
  modified_base 1: mod_base = OTHER; note = 2'-O-methyladenosine-3'-phosphorothioate
  modified_base 2: mod_base = OTHER; note = 2'-fluoroadenosine-3'-phosphorothioate
  modified_base 3: mod_base = OTHER; note = 2'-O-methylcytidine-3'-phosphate
  modified_base 4: mod_base = OTHER; note = 2'-O-methylguanosine-3'-phosphate
  modified_base 6: mod_base = OTHER; note = 2'-O-methylcytidine-3'-phosphate
  modified_base 7: mod_base = OTHER; note = Adenosine-glycol nucleic acid (GNA)
  modified_base 8: mod_base = OTHER; note = 2'-O-methylguanosine-3'-phosphate
  modified_base 9: mod_base = OTHER; note = 2'-O-methyladenosine-3'-phosphate
  modified_base 10: mod_base = OTHER; note = 2'-O-methyladenosine-3'-phosphate
  modified_base 11: mod_base = OTHER; note = 2'-O-methyluridine-3'-phosphate
  modified_base 12: mod_base = OTHER; note = 2'-O-methylguanosine-3'-phosphate
  modified_base 13: mod_base = OTHER; note = 2'-O-methylguanosine-3'-phosphate
  modified_base 14: mod_base = OTHER; note = 2'-fluoroadenosine-3'-phosphate
  modified_base 15: mod_base = OTHER; note = 2'-O-methyladenosine-3'-phosphate
  modified_base 16: mod_base = OTHER; note = 2'-fluoroadenosine-3'-phosphate
  modified_base 17: mod_base = OTHER; note = 2'-O-methylguanosine-3'-phosphate
  modified_base 18: mod_base = OTHER; note = 2'-O-methyladenosine-3'-phosphate
  modified_base 19: mod_base = OTHER; note = 2'-O-methylguanosine-3'-phosphate
  modified_base 20: mod_base = OTHER; note = 2'-O-methylguanosine-3'-phosphate
  modified_base 21: mod_base = OTHER; note = 2'-O-methylcytidine-3'-phosphorothioate
  modified_base 22: mod_base = OTHER; note = 2'-O-methyladenosine-3'-phosphorothioate
  modified_base 23: mod_base = OTHER; note = 2'-O-methylguanosine-3'-phosphate
  misc_feature 1..4: note = RNA
  misc_feature 5: note = DNA
  misc_feature 6..23: note = RNA
aacggcagaatggaaagaggcag

SEQ ID NO: 7831 - DNA, 23 bp, synthetic construct
  source 1..23: mol_type = other DNA
  modified_base 1: mod_base = OTHER; note = 2'-O-methyladenosine-3'-phosphorothioate
  modified_base 2: mod_base = OTHER; note = 2'-fluorouridine -3'-phosphorothioate
  modified_base 3: mod_base = OTHER; note = 2'-O-methylguanosine-3'-phosphate
  modified_base 4: mod_base = OTHER; note = 2'-O-methyladenosine-3'-phosphate
  modified_base 6: mod_base = OTHER; note = 2'-O-methylguanosine-3'-phosphate
  modified_base 7: mod_base = OTHER; note = Adenosine-glycol nucleic acid (GNA)
  modified_base 8: mod_base = OTHER; note = 2'-O-methylcytidine-3'-phosphate
  modified_base 9: mod_base = OTHER; note = 2'-O-methylguanosine-3'-phosphate
  modified_base 10: mod_base = OTHER; note = 2'-O-methylguanosine-3'-phosphate
  modified_base 11: mod_base = OTHER; note = 2'-O-methylcytidine-3'-phosphate
  modified_base 12: mod_base = OTHER; note = 2'-O-methyladenosine-3'-phosphate
  modified_base 13: mod_base = OTHER; note = 2'-O-methylguanosine-3'-phosphate
  modified_base 14: mod_base = OTHER; note = 2'-fluoroadenosine-3'-phosphate
  modified_base 15: mod_base = OTHER; note = 2'-O-methyladenosine-3'-phosphate
  modified_base 16: mod_base = OTHER; note = 2'-fluorouridine-3'-phosphate
  modified_base 17: mod_base = OTHER; note = 2'-O-methylguanosine-3'-phosphate
  modified_base 18: mod_base = OTHER; note = 2'-O-methylguanosine-3'-phosphate
  modified_base 19: mod_base = OTHER; note = 2'-O-methyladenosine-3'-phosphate
  modified_base 20: mod_base = OTHER; note = 2'-O-methyladenosine-3'-phosphate
  modified_base 21: mod_base = OTHER; note = 2'-O-methyladenosine-3'-phosphorothioate
  modified_base 22: mod_base = OTHER; note = 2'-O-methylguanosine-3'-phosphorothioate
  modified_base 23: mod_base = OTHER; note = 2'-O-methyladenosine-3'-phosphate
  misc_feature 1..4: note = RNA
  misc_feature 5: note = DNA
  misc_feature 6..23: note = RNA
atgaagacggcagaatggaaaga

SEQ ID NO: 7832 - DNA, 23 bp, synthetic construct
  source 1..23: mol_type = other DNA
  modified_base 1: mod_base = OTHER; note = 2'-O-methyladenosine-3'-phosphorothioate
  modified_base 2: mod_base = OTHER; note = 2'-fluoroguanosine-3'-phosphorothioate
  modified_base 3: mod_base = OTHER; note = 2'-O-methylcytidine-3'-phosphate
  modified_base 4: mod_base = OTHER; note = 2'-O-methyluridine-3'-phosphate
  modified_base 6: mod_base = OTHER; note = 2'-O-methyladenosine-3'-phosphate
  modified_base 7: mod_base = OTHER; note = Adenosine-glycol nucleic acid (GNA)
  modified_base 8: mod_base = OTHER; note = 2'-O-methylguanosine-3'-phosphate
  modified_base 9: mod_base = OTHER; note = 2'-O-methyladenosine-3'-phosphate
  modified_base 10: mod_base = OTHER; note = 2'-O-methylcytidine-3'-phosphate
  modified_base 11: mod_base = OTHER; note = 2'-O-methylguanosine-3'-phosphate
  modified_base 12: mod_base = OTHER; note = 2'-O-methylguanosine-3'-phosphate
  modified_base 13: mod_base = OTHER; note = 2'-O-methylcytidine-3'-phosphate
  modified_base 14: mod_base = OTHER; note = 2'-fluoroadenosine-3'-phosphate
  modified_base 15: mod_base = OTHER; note = 2'-O-methylguanosine-3'-phosphate
  modified_base 16: mod_base = OTHER; note = 2'-fluoroadenosine-3'-phosphate
  modified_base 17: mod_base = OTHER; note = 2'-O-methyladenosine-3'-phosphate
  modified_base 18: mod_base = OTHER; note = 2'-O-methyluridine-3'-phosphate
  modified_base 19: mod_base = OTHER; note = 2'-O-methylguanosine-3'-phosphate
  modified_base 20: mod_base = OTHER; note = 2'-O-methylguanosine-3'-phosphate
  modified_base 21: mod_base = OTHER; note = 2'-O-methyladenosine-3'-phosphorothioate
  modified_base 22: mod_base = OTHER; note = 2'-O-methyladenosine-3'-phosphorothioate
  modified_base 23: mod_base = OTHER; note = 2'-O-methyladenosine-3'-phosphate
  misc_feature 1..4: note = RNA
  misc_feature 5: note = DNA
  misc_feature 6..23: note = RNA
agctgaagacggcagaatggaaa

SEQ ID NO: 7833 - DNA, 23 bp, synthetic construct
  source 1..23: mol_type = other DNA
  modified_base 1: mod_base = OTHER; note = 2'-O-methyladenosine-3'-phosphorothioate
  modified_base 2: mod_base = OTHER; note = 2'-fluoroguanosine-3'-phosphorothioate
  modified_base 3: mod_base = OTHER; note = 2'-O-methylguanosine-3'-phosphate
  modified_base 4: mod_base = OTHER; note = 2'-O-methylcytidine-3'-phosphate
  modified_base 6: mod_base = OTHER; note = 2'-O-methylguanosine-3'-phosphate
  modified_base 7: mod_base = OTHER; note = Adenosine-glycol nucleic acid (GNA)
  modified_base 8: mod_base = OTHER; note = 2'-O-methyladenosine-3'-phosphate
  modified_base 9: mod_base = OTHER; note = 2'-O-methylguanosine-3'-phosphate
  modified_base 10: mod_base = OTHER; note = 2'-O-methyladenosine-3'-phosphate
  modified_base 11: mod_base = OTHER; note = 2'-O-methylcytidine-3'-phosphate
  modified_base 12: mod_base = OTHER; note = 2'-O-methylguanosine-3'-phosphate
  modified_base 13: mod_base = OTHER; note = 2'-O-methylguanosine-3'-phosphate
  modified_base 14: mod_base = OTHER; note = 2'-fluorocytidine-3'-phosphate
  modified_base 15: mod_base = OTHER; note = 2'-O-methyladenosine-3'-phosphate
  modified_base 16: mod_base = OTHER; note = 2'-fluoroguanosine-3'-phosphate
  modified_base 17: mod_base = OTHER; note = 2'-O-methyladenosine-3'-phosphate
  modified_base 18: mod_base = OTHER; note = 2'-O-methyladenosine-3'-phosphate
  modified_base 19: mod_base = OTHER; note = 2'-O-methyluridine-3'-phosphate
  modified_base 20: mod_base = OTHER; note = 2'-O-methylguanosine-3'-phosphate
  modified_base 21: mod_base = OTHER; note = 2'-O-methylguanosine-3'-phosphorothioate
  modified_base 22: mod_base = OTHER; note = 2'-O-methyladenosine-3'-phosphorothioate
  modified_base 23: mod_base = OTHER; note = 2'-O-methyladenosine-3'-phosphate
  misc_feature 1..4: note = RNA
  misc_feature 5: note = DNA
  misc_feature 6..23: note = RNA
aggctgaagacggcagaatggaa

SEQ ID NO: 7834 - DNA, 23 bp, synthetic construct
  source 1..23: mol_type = other DNA
  modified_base 1: mod_base = OTHER; note = 2'-O-methyladenosine-3'-phosphorothioate
  modified_base 2: mod_base = OTHER; note = 2'-fluorocytidine-3'-phosphorothioate
  modified_base 3: mod_base = OTHER; note = 2'-O-methyluridine-3'-phosphate
  modified_base 4: mod_base = OTHER; note = 2'-O-methyluridine-3'-phosphate
  modified_base 6: mod_base = OTHER; note = 2'-O-methylguanosine-3'-phosphate
  modified_base 7: mod_base = OTHER; note = Adenosine-glycol nucleic acid (GNA)
  modified_base 8: mod_base = OTHER; note = 2'-O-methylguanosine-3'-phosphate
  modified_base 9: mod_base = OTHER; note = 2'-O-methylguanosine-3'-phosphate
  modified_base 10: mod_base = OTHER; note = 2'-O-methyladenosine-3'-phosphate
  modified_base 11: mod_base = OTHER; note = 2'-O-methylguanosine-3'-phosphate
  modified_base 12: mod_base = OTHER; note = 2'-O-methylguanosine-3'-phosphate
  modified_base 13: mod_base = OTHER; note = 2'-O-methylcytidine-3'-phosphate
  modified_base 14: mod_base = OTHER; note = 2'-fluorouridine-3'-phosphate
  modified_base 15: mod_base = OTHER; note = 2'-O-methylguanosine-3'-phosphate
  modified_base 16: mod_base = OTHER; note = 2'-fluoroadenosine-3'-phosphate
  modified_base 17: mod_base = OTHER; note = 2'-O-methyladenosine-3'-phosphate
  modified_base 18: mod_base = OTHER; note = 2'-O-methylguanosine-3'-phosphate
  modified_base 19: mod_base = OTHER; note = 2'-O-methyladenosine-3'-phosphate
  modified_base 20: mod_base = OTHER; note = 2'-O-methylcytidine-3'-phosphate
  modified_base 21: mod_base = OTHER; note = 2'-O-methylguanosine-3'-phosphorothioate
  modified_base 22: mod_base = OTHER; note = 2'-O-methylguanosine-3'-phosphorothioate
  modified_base 23: mod_base = OTHER; note = 2'-O-methylcytidine-3'-phosphate
  misc_feature 1..4: note = RNA
  misc_feature 5: note = DNA
  misc_feature 6..23: note = RNA
actttgaggaggctgaagacggc

SEQ ID NO: 7835 - DNA, 23 bp, synthetic construct
  source 1..23: mol_type = other DNA
  modified_base 1: mod_base = OTHER; note = 2'-O-methyladenosine-3'-phosphorothioate
  modified_base 2: mod_base = OTHER; note = 2'-fluoroguanosine-3'-phosphorothioate
  modified_base 3: mod_base = OTHER; note = 2'-O-methylguanosine-3'-phosphate
  modified_base 4: mod_base = OTHER; note = 2'-O-methylcytidine-3'-phosphate
  modified_base 6: mod_base = OTHER; note = 2'-O-methyluridine-3'-phosphate
  modified_base 7: mod_base = OTHER; note = Thymidine-glycol nucleic acid (GNA) S-Isomer
  modified_base 8: mod_base = OTHER; note = 2'-O-methylguanosine-3'-phosphate
  modified_base 9: mod_base = OTHER; note = 2'-O-methyladenosine-3'-phosphate
  modified_base 10: mod_base = OTHER; note = 2'-O-methylguanosine-3'-phosphate
  modified_base 11: mod_base = OTHER; note = 2'-O-methylguanosine-3'-phosphate
  modified_base 12: mod_base = OTHER; note = 2'-O-methyladenosine-3'-phosphate
  modified_base 13: mod_base = OTHER; note = 2'-O-methylguanosine-3'-phosphate
  modified_base 14: mod_base = OTHER; note = 2'-fluoroguanosine-3'-phosphate
  modified_base 15: mod_base = OTHER; note = 2'-O-methylcytidine-3'-phosphate
  modified_base 16: mod_base = OTHER; note = 2'-fluorouridine-3'-phosphate
  modified_base 17: mod_base = OTHER; note = 2'-O-methylguanosine-3'-phosphate
  modified_base 18: mod_base = OTHER; note = 2'-O-methyladenosine-3'-phosphate
  modified_base 19: mod_base = OTHER; note = 2'-O-methyladenosine-3'-phosphate
  modified_base 20: mod_base = OTHER; note = 2'-O-methylguanosine-3'-phosphate
  modified_base 21: mod_base = OTHER; note = 2'-O-methyladenosine-3'-phosphorothioate
  modified_base 22: mod_base = OTHER; note = 2'-O-methylcytidine-3'-phosphorothioate
  modified_base 23: mod_base = OTHER; note = 2'-O-methylguanosine-3'-phosphate
  misc_feature 1..4: note = RNA
  misc_feature 5: note = DNA
  misc_feature 6: note = RNA
  misc_feature 7: note = DNA
  misc_feature 8..23: note = RNA
aggctttgaggaggctgaagacg

SEQ ID NO: 7836 - DNA, 23 bp, synthetic construct
  source 1..23: mol_type = other DNA
  modified_base 1: mod_base = OTHER; note = 2'-O-methyladenosine-3'-phosphorothioate
  modified_base 2: mod_base = OTHER; note = 2'-fluorouridine -3'-phosphorothioate
  modified_base 3: mod_base = OTHER; note = 2'-O-methylguanosine-3'-phosphate
  modified_base 4: mod_base = OTHER; note = 2'-O-methylguanosine-3'-phosphate
  modified_base 6: mod_base = OTHER; note = 2'-O-methyluridine-3'-phosphate
  modified_base 7: mod_base = OTHER; note = Thymidine-glycol nucleic acid (GNA) S-Isomer
  modified_base 8: mod_base = OTHER; note = 2'-O-methyluridine-3'-phosphate
  modified_base 9: mod_base = OTHER; note = 2'-O-methylguanosine-3'-phosphate
  modified_base 10: mod_base = OTHER; note = 2'-O-methyladenosine-3'-phosphate
  modified_base 11: mod_base = OTHER; note = 2'-O-methylguanosine-3'-phosphate
  modified_base 12: mod_base = OTHER; note = 2'-O-methylguanosine-3'-phosphate
  modified_base 13: mod_base = OTHER; note = 2'-O-methyladenosine-3'-phosphate
  modified_base 14: mod_base = OTHER; note = 2'-fluoroguanosine-3'-phosphate
  modified_base 15: mod_base = OTHER; note = 2'-O-methylguanosine-3'-phosphate
  modified_base 16: mod_base = OTHER; note = 2'-fluorocytidine-3'-phosphate
  modified_base 17: mod_base = OTHER; note = 2'-O-methyluridine-3'-phosphate
  modified_base 18: mod_base = OTHER; note = 2'-O-methylguanosine-3'-phosphate
  modified_base 19: mod_base = OTHER; note = 2'-O-methyladenosine-3'-phosphate
  modified_base 20: mod_base = OTHER; note = 2'-O-methyladenosine-3'-phosphate
  modified_base 21: mod_base = OTHER; note = 2'-O-methylguanosine-3'-phosphorothioate
  modified_base 22: mod_base = OTHER; note = 2'-O-methyladenosine-3'-phosphorothioate
  modified_base 23: mod_base = OTHER; note = 2'-O-methylcytidine-3'-phosphate
  misc_feature 1..4: note = RNA
  misc_feature 5: note = DNA
  misc_feature 6: note = RNA
  misc_feature 7: note = DNA
  misc_feature 8..23: note = RNA
atggctttgaggaggctgaagac

SEQ ID NO: 7837 - DNA, 23 bp, synthetic construct
  source 1..23: mol_type = other DNA
  modified_base 1: mod_base = OTHER; note = 2'-O-methyladenosine-3'-phosphorothioate
  modified_base 2: mod_base = OTHER; note = 2'-fluoroadenosine-3'-phosphorothioate
  modified_base 3: mod_base = OTHER; note = 2'-O-methyluridine-3'-phosphate
  modified_base 4: mod_base = OTHER; note = 2'-O-methyluridine-3'-phosphate
  modified_base 6: mod_base = OTHER; note = 2'-O-methyluridine-3'-phosphate
  modified_base 7: mod_base = OTHER; note = Thymidine-glycol nucleic acid (GNA) S-Isomer
  modified_base 8: mod_base = OTHER; note = 2'-O-methylguanosine-3'-phosphate
  modified_base 9: mod_base = OTHER; note = 2'-O-methylguanosine-3'-phosphate
  modified_base 10: mod_base = OTHER; note = 2'-O-methylcytidine-3'-phosphate
  modified_base 11: mod_base = OTHER; note = 2'-O-methyluridine-3'-phosphate
  modified_base 12: mod_base = OTHER; note = 2'-O-methyluridine-3'-phosphate
  modified_base 13: mod_base = OTHER; note = 2'-O-methyluridine-3'-phosphate
  modified_base 14: mod_base = OTHER; note = 2'-fluoroguanosine-3'-phosphate
  modified_base 15: mod_base = OTHER; note = 2'-O-methyladenosine-3'-phosphate
  modified_base 16: mod_base = OTHER; note = 2'-fluoroguanosine-3'-phosphate
  modified_base 17: mod_base = OTHER; note = 2'-O-methylguanosine-3'-phosphate
  modified_base 18: mod_base = OTHER; note = 2'-O-methyladenosine-3'-phosphate
  modified_base 19: mod_base = OTHER; note = 2'-O-methylguanosine-3'-phosphate
  modified_base 20: mod_base = OTHER; note = 2'-O-methylguanosine-3'-phosphate
  modified_base 21: mod_base = OTHER; note = 2'-O-methylcytidine-3'-phosphorothioate
  modified_base 22: mod_base = OTHER; note = 2'-O-methyluridine-3'-phosphorothioate
  modified_base 23: mod_base = OTHER; note = 2'-O-methylguanosine-3'-phosphate
  misc_feature 1..4: note = RNA
  misc_feature 5: note = DNA
  misc_feature 6: note = RNA
  misc_feature 7: note = DNA
  misc_feature 8..23: note = RNA
aattgttggctttgaggaggctg

SEQ ID NO: 7838 - DNA, 23 bp, synthetic construct
  source 1..23: mol_type = other DNA
  modified_base 1: mod_base = OTHER; note = 2'-O-methyladenosine-3'-phosphorothioate
  modified_base 2: mod_base = OTHER; note = 2'-fluoroguanosine-3'-phosphorothioate
  modified_base 3: mod_base = OTHER; note = 2'-O-methyladenosine-3'-phosphate
  modified_base 4: mod_base = OTHER; note = 2'-O-methyluridine-3'-phosphate
  modified_base 6: mod_base = OTHER; note = 2'-O-methylguanosine-3'-phosphate
  modified_base 7: mod_base = OTHER; note = Thymidine-glycol nucleic acid (GNA) S-Isomer
  modified_base 8: mod_base = OTHER; note = 2'-O-methyluridine-3'-phosphate
  modified_base 9: mod_base = OTHER; note = 2'-O-methylguanosine-3'-phosphate
  modified_base 10: mod_base = OTHER; note = 2'-O-methylguanosine-3'-phosphate
  modified_base 11: mod_base = OTHER; note = 2'-O-methylcytidine-3'-phosphate
  modified_base 12: mod_base = OTHER; note = 2'-O-methyluridine-3'-phosphate
  modified_base 13: mod_base = OTHER; note = 2'-O-methyluridine-3'-phosphate
  modified_base 14: mod_base = OTHER; note = 2'-fluorouridine-3'-phosphate
  modified_base 15: mod_base = OTHER; note = 2'-O-methylguanosine-3'-phosphate
  modified_base 16: mod_base = OTHER; note = 2'-fluoroadenosine-3'-phosphate
  modified_base 17: mod_base = OTHER; note = 2'-O-methylguanosine-3'-phosphate
  modified_base 18: mod_base = OTHER; note = 2'-O-methylguanosine-3'-phosphate
  modified_base 19: mod_base = OTHER; note = 2'-O-methyladenosine-3'-phosphate
  modified_base 20: mod_base = OTHER; note = 2'-O-methylguanosine-3'-phosphate
  modified_base 21: mod_base = OTHER; note = 2'-O-methylguanosine-3'-phosphorothioate
  modified_base 22: mod_base = OTHER; note = 2'-O-methylcytidine-3'-phosphorothioate
  modified_base 23: mod_base = OTHER; note = 2'-O-methyluridine-3'-phosphate
  misc_feature 1..4: note = RNA
  misc_feature 5: note = DNA
  misc_feature 6: note = RNA
  misc_feature 7: note = DNA
  misc_feature 8..23: note = RNA
agattgttggctttgaggaggct

SEQ ID NO: 7839 - DNA, 23 bp, synthetic construct
  source 1..23: mol_type = other DNA
  modified_base 1: mod_base = OTHER; note = 2'-O-methyladenosine-3'-phosphorothioate
  modified_base 2: mod_base = OTHER; note = 2'-fluoroadenosine-3'-phosphorothioate
  modified_base 3: mod_base = OTHER; note = 2'-O-methyladenosine-3'-phosphate
  modified_base 4: mod_base = OTHER; note = 2'-O-methylguanosine-3'-phosphate
  modified_base 6: mod_base = OTHER; note = 2'-O-methyladenosine-3'-phosphate
  modified_base 7: mod_base = OTHER; note = Thymidine-glycol nucleic acid (GNA) S-Isomer
  modified_base 8: mod_base = OTHER; note = 2'-O-methyluridine-3'-phosphate
  modified_base 9: mod_base = OTHER; note = 2'-O-methylguanosine-3'-phosphate
  modified_base 10: mod_base = OTHER; note = 2'-O-methyluridine-3'-phosphate
  modified_base 11: mod_base = OTHER; note = 2'-O-methyluridine-3'-phosphate
  modified_base 12: mod_base = OTHER; note = 2'-O-methylguanosine-3'-phosphate
  modified_base 13: mod_base = OTHER; note = 2'-O-methylguanosine-3'-phosphate
  modified_base 14: mod_base = OTHER; note = 2'-fluorocytidine-3'-phosphate
  modified_base 15: mod_base = OTHER; note = 2'-O-methyluridine-3'-phosphate
  modified_base 16: mod_base = OTHER; note = 2'-fluorouridine-3'-phosphate
  modified_base 17: mod_base = OTHER; note = 2'-O-methyluridine-3'-phosphate
  modified_base 18: mod_base = OTHER; note = 2'-O-methylguanosine-3'-phosphate
  modified_base 19: mod_base = OTHER; note = 2'-O-methyladenosine-3'-phosphate
  modified_base 20: mod_base = OTHER; note = 2'-O-methylguanosine-3'-phosphate
  modified_base 21: mod_base = OTHER; note = 2'-O-methylguanosine-3'-phosphorothioate
  modified_base 22: mod_base = OTHER; note = 2'-O-methyladenosine-3'-phosphorothioate
  modified_base 23: mod_base = OTHER; note = 2'-O-methylguanosine-3'-phosphate
  misc_feature 1..4: note = RNA
  misc_feature 5: note = DNA
  misc_feature 6: note = RNA
  misc_feature 7: note = DNA
  misc_feature 8..23: note = RNA
aaaggattgttggctttgaggag

SEQ ID NO: 7840 - DNA, 23 bp, synthetic construct
  source 1..23: mol_type = other DNA
  modified_base 1: mod_base = OTHER; note = 2'-O-methyladenosine-3'-phosphorothioate
  modified_base 2: mod_base = OTHER; note = 2'-fluorocytidine-3'-phosphorothioate
  modified_base 3: mod_base = OTHER; note = 2'-O-methyluridine-3'-phosphate
  modified_base 4: mod_base = OTHER; note = 2'-O-methylguanosine-3'-phosphate
  modified_base 6: mod_base = OTHER; note = 2'-O-methylcytidine-3'-phosphate
  modified_base 7: mod_base = OTHER; note = Adenosine-glycol nucleic acid (GNA)
  modified_base 8: mod_base = OTHER; note = 2'-O-methylguanosine-3'-phosphate
  modified_base 9: mod_base = OTHER; note = 2'-O-methylguanosine-3'-phosphate
  modified_base 10: mod_base = OTHER; note = 2'-O-methylcytidine-3'-phosphate
  modified_base 11: mod_base = OTHER; note = 2'-O-methylcytidine-3'-phosphate
  modified_base 12: mod_base = OTHER; note = 2'-O-methyladenosine-3'-phosphate
  modified_base 13: mod_base = OTHER; note = 2'-O-methyladenosine-3'-phosphate
  modified_base 14: mod_base = OTHER; note = 2'-fluoroguanosine-3'-phosphate
  modified_base 15: mod_base = OTHER; note = 2'-O-methylguanosine-3'-phosphate
  modified_base 16: mod_base = OTHER; note = 2'-fluoroadenosine-3'-phosphate
  modified_base 17: mod_base = OTHER; note = 2'-O-methyluridine-3'-phosphate
  modified_base 18: mod_base = OTHER; note = 2'-O-methyluridine-3'-phosphate
  modified_base 19: mod_base = OTHER; note = 2'-O-methylguanosine-3'-phosphate
  modified_base 20: mod_base = OTHER; note = 2'-O-methyluridine-3'-phosphate
  modified_base 21: mod_base = OTHER; note = 2'-O-methyluridine-3'-phosphorothioate
  modified_base 22: mod_base = OTHER; note = 2'-O-methylguanosine-3'-phosphorothioate
  modified_base 23: mod_base = OTHER; note = 2'-O-methylguanosine-3'-phosphate
  misc_feature 1..4: note = RNA
  misc_feature 5: note = DNA
  misc_feature 6..23: note = RNA
actggcaggccaaggattgttgg

SEQ ID NO: 7841 - DNA, 23 bp, synthetic construct
  source 1..23: mol_type = other DNA
  modified_base 1: mod_base = OTHER; note = 2'-O-methyladenosine-3'-phosphorothioate
  modified_base 2: mod_base = OTHER; note = 2'-fluorouridine -3'-phosphorothioate
  modified_base 3: mod_base = OTHER; note = 2'-O-methyladenosine-3'-phosphate
  modified_base 4: mod_base = OTHER; note = 2'-O-methyluridine-3'-phosphate
  modified_base 6: mod_base = OTHER; note = 2'-O-methyladenosine-3'-phosphate
  modified_base 7: mod_base = OTHER; note = Thymidine-glycol nucleic acid (GNA) S-Isomer
  modified_base 8: mod_base = OTHER; note = 2'-O-methylcytidine-3'-phosphate
  modified_base 9: mod_base = OTHER; note = 2'-O-methylcytidine-3'-phosphate
  modified_base 10: mod_base = OTHER; note = 2'-O-methyladenosine-3'-phosphate
  modified_base 11: mod_base = OTHER; note = 2'-O-methylguanosine-3'-phosphate
  modified_base 12: mod_base = OTHER; note = 2'-O-methylguanosine-3'-phosphate
  modified_base 13: mod_base = OTHER; note = 2'-O-methyluridine-3'-phosphate
  modified_base 14: mod_base = OTHER; note = 2'-fluoroadenosine-3'-phosphate
  modified_base 15: mod_base = OTHER; note = 2'-O-methylguanosine-3'-phosphate
  modified_base 16: mod_base = OTHER; note = 2'-fluoroadenosine-3'-phosphate
  modified_base 17: mod_base = OTHER; note = 2'-O-methylguanosine-3'-phosphate
  modified_base 18: mod_base = OTHER; note = 2'-O-methylguanosine-3'-phosphate
  modified_base 19: mod_base = OTHER; note = 2'-O-methyladenosine-3'-phosphate
  modified_base 20: mod_base = OTHER; note = 2'-O-methylguanosine-3'-phosphate
  modified_base 21: mod_base = OTHER; note = 2'-O-methyladenosine-3'-phosphorothioate
  modified_base 22: mod_base = OTHER; note = 2'-O-methylguanosine-3'-phosphorothioate
  modified_base 23: mod_base = OTHER; note = 2'-O-methyladenosine-3'-phosphate
  misc_feature 1..4: note = RNA
  misc_feature 5: note = DNA
  misc_feature 6: note = RNA
  misc_feature 7: note = DNA
  misc_feature 8..23: note = RNA
atatgatccaggtagaggagaga

SEQ ID NO: 7842 - DNA, 23 bp, synthetic construct
  source 1..23: mol_type = other DNA
  modified_base 1: mod_base = OTHER; note = 2'-O-methyladenosine-3'-phosphorothioate
  modified_base 2: mod_base = OTHER; note = 2'-fluorouridine -3'-phosphorothioate
  modified_base 3: mod_base = OTHER; note = 2'-O-methyluridine-3'-phosphate
  modified_base 4: mod_base = OTHER; note = 2'-O-methyladenosine-3'-phosphate
  modified_base 6: mod_base = OTHER; note = 2'-O-methylguanosine-3'-phosphate
  modified_base 7: mod_base = OTHER; note = Adenosine-glycol nucleic acid (GNA)
  modified_base 8: mod_base = OTHER; note = 2'-O-methyluridine-3'-phosphate
  modified_base 9: mod_base = OTHER; note = 2'-O-methylcytidine-3'-phosphate
  modified_base 10: mod_base = OTHER; note = 2'-O-methylcytidine-3'-phosphate
  modified_base 11: mod_base = OTHER; note = 2'-O-methyladenosine-3'-phosphate
  modified_base 12: mod_base = OTHER; note = 2'-O-methylguanosine-3'-phosphate
  modified_base 13: mod_base = OTHER; note = 2'-O-methylguanosine-3'-phosphate
  modified_base 14: mod_base = OTHER; note = 2'-fluorouridine-3'-phosphate
  modified_base 15: mod_base = OTHER; note = 2'-O-methyladenosine-3'-phosphate
  modified_base 16: mod_base = OTHER; note = 2'-fluoroguanosine-3'-phosphate
  modified_base 17: mod_base = OTHER; note = 2'-O-methyladenosine-3'-phosphate
  modified_base 18: mod_base = OTHER; note = 2'-O-methylguanosine-3'-phosphate
  modified_base 19: mod_base = OTHER; note = 2'-O-methylguanosine-3'-phosphate
  modified_base 20: mod_base = OTHER; note = 2'-O-methyladenosine-3'-phosphate
  modified_base 21: mod_base = OTHER; note = 2'-O-methylguanosine-3'-phosphorothioate
  modified_base 22: mod_base = OTHER; note = 2'-O-methyladenosine-3'-phosphorothioate
  modified_base 23: mod_base = OTHER; note = 2'-O-methylguanosine-3'-phosphate
  misc_feature 1..4: note = RNA
  misc_feature 5: note = DNA
  misc_feature 6..23: note = RNA
attatgatccaggtagaggagag

SEQ ID NO: 7843 - DNA, 23 bp, synthetic construct
  source 1..23: mol_type = other DNA
  modified_base 1: mod_base = OTHER; note = 2'-O-methyladenosine-3'-phosphorothioate
  modified_base 2: mod_base = OTHER; note = 2'-fluorouridine -3'-phosphorothioate
  modified_base 3: mod_base = OTHER; note = 2'-O-methylguanosine-3'-phosphate
  modified_base 4: mod_base = OTHER; note = 2'-O-methylcytidine-3'-phosphate
  modified_base 6: mod_base = OTHER; note = 2'-O-methyladenosine-3'-phosphate
  modified_base 7: mod_base = OTHER; note = Thymidine-glycol nucleic acid (GNA) S-Isomer
  modified_base 8: mod_base = OTHER; note = 2'-O-methyluridine-3'-phosphate
  modified_base 9: mod_base = OTHER; note = 2'-O-methyladenosine-3'-phosphate
  modified_base 10: mod_base = OTHER; note = 2'-O-methyluridine-3'-phosphate
  modified_base 11: mod_base = OTHER; note = 2'-O-methylguanosine-3'-phosphate
  modified_base 12: mod_base = OTHER; note = 2'-O-methyladenosine-3'-phosphate
  modified_base 13: mod_base = OTHER; note = 2'-O-methyluridine-3'-phosphate
  modified_base 14: mod_base = OTHER; note = 2'-fluorocytidine-3'-phosphate
  modified_base 15: mod_base = OTHER; note = 2'-O-methylcytidine-3'-phosphate
  modified_base 16: mod_base = OTHER; note = 2'-fluoroadenosine-3'-phosphate
  modified_base 17: mod_base = OTHER; note = 2'-O-methylguanosine-3'-phosphate
  modified_base 18: mod_base = OTHER; note = 2'-O-methylguanosine-3'-phosphate
  modified_base 19: mod_base = OTHER; note = 2'-O-methyluridine-3'-phosphate
  modified_base 20: mod_base = OTHER; note = 2'-O-methyladenosine-3'-phosphate
  modified_base 21: mod_base = OTHER; note = 2'-O-methylguanosine-3'-phosphorothioate
  modified_base 22: mod_base = OTHER; note = 2'-O-methyladenosine-3'-phosphorothioate
  modified_base 23: mod_base = OTHER; note = 2'-O-methylguanosine-3'-phosphate
  misc_feature 1..4: note = RNA
  misc_feature 5: note = DNA
  misc_feature 6: note = RNA
  misc_feature 7: note = DNA
  misc_feature 8..23: note = RNA
atgccattatgatccaggtagag

SEQ ID NO: 7844 - DNA, 23 bp, synthetic construct
  source 1..23: mol_type = other DNA
  modified_base 1: mod_base = OTHER; note = 2'-O-methyladenosine-3'-phosphorothioate
  modified_base 2: mod_base = OTHER; note = 2'-fluorouridine -3'-phosphorothioate
  modified_base 3: mod_base = OTHER; note = 2'-O-methyluridine-3'-phosphate
  modified_base 4: mod_base = OTHER; note = 2'-O-methylguanosine-3'-phosphate
  modified_base 6: mod_base = OTHER; note = 2'-O-methylcytidine-3'-phosphate
  modified_base 7: mod_base = OTHER; note = Adenosine-glycol nucleic acid (GNA)
  modified_base 8: mod_base = OTHER; note = 2'-O-methyluridine-3'-phosphate
  modified_base 9: mod_base = OTHER; note = 2'-O-methyluridine-3'-phosphate
  modified_base 10: mod_base = OTHER; note = 2'-O-methyladenosine-3'-phosphate
  modified_base 11: mod_base = OTHER; note = 2'-O-methyluridine-3'-phosphate
  modified_base 12: mod_base = OTHER; note = 2'-O-methylguanosine-3'-phosphate
  modified_base 13: mod_base = OTHER; note = 2'-O-methyladenosine-3'-phosphate
  modified_base 14: mod_base = OTHER; note = 2'-fluorouridine-3'-phosphate
  modified_base 15: mod_base = OTHER; note = 2'-O-methylcytidine-3'-phosphate
  modified_base 16: mod_base = OTHER; note = 2'-fluorocytidine-3'-phosphate
  modified_base 17: mod_base = OTHER; note = 2'-O-methyladenosine-3'-phosphate
  modified_base 18: mod_base = OTHER; note = 2'-O-methylguanosine-3'-phosphate
  modified_base 19: mod_base = OTHER; note = 2'-O-methylguanosine-3'-phosphate
  modified_base 20: mod_base = OTHER; note = 2'-O-methyluridine-3'-phosphate
  modified_base 21: mod_base = OTHER; note = 2'-O-methyladenosine-3'-phosphorothioate
  modified_base 22: mod_base = OTHER; note = 2'-O-methylguanosine-3'-phosphorothioate
  modified_base 23: mod_base = OTHER; note = 2'-O-methyladenosine-3'-phosphate
  misc_feature 1..4: note = RNA
  misc_feature 5: note = DNA
  misc_feature 6..23: note = RNA
attgccattatgatccaggtaga

SEQ ID NO: 7845 - DNA, 23 bp, synthetic construct
  source 1..23: mol_type = other DNA
  modified_base 1: mod_base = OTHER; note = 2'-O-methyladenosine-3'-phosphorothioate
  modified_base 2: mod_base = OTHER; note = 2'-fluorouridine -3'-phosphorothioate
  modified_base 3: mod_base = OTHER; note = 2'-O-methylguanosine-3'-phosphate
  modified_base 4: mod_base = OTHER; note = 2'-O-methyladenosine-3'-phosphate
  modified_base 6: mod_base = OTHER; note = 2'-O-methylcytidine-3'-phosphate
  modified_base 7: mod_base = OTHER; note = Adenosine-glycol nucleic acid (GNA)
  modified_base 8: mod_base = OTHER; note = 2'-O-methylcytidine-3'-phosphate
  modified_base 9: mod_base = OTHER; note = 2'-O-methyladenosine-3'-phosphate
  modified_base 10: mod_base = OTHER; note = 2'-O-methyluridine-3'-phosphate
  modified_base 11: mod_base = OTHER; note = 2'-O-methyluridine-3'-phosphate
  modified_base 12: mod_base = OTHER; note = 2'-O-methylguanosine-3'-phosphate
  modified_base 13: mod_base = OTHER; note = 2'-O-methylcytidine-3'-phosphate
  modified_base 14: mod_base = OTHER; note = 2'-fluorocytidine-3'-phosphate
  modified_base 15: mod_base = OTHER; note = 2'-O-methyladenosine-3'-phosphate
  modified_base 16: mod_base = OTHER; note = 2'-fluorouridine-3'-phosphate
  modified_base 17: mod_base = OTHER; note = 2'-O-methyluridine-3'-phosphate
  modified_base 18: mod_base = OTHER; note = 2'-O-methyladenosine-3'-phosphate
  modified_base 19: mod_base = OTHER; note = 2'-O-methyluridine-3'-phosphate
  modified_base 20: mod_base = OTHER; note = 2'-O-methylguanosine-3'-phosphate
  modified_base 21: mod_base = OTHER; note = 2'-O-methyladenosine-3'-phosphorothioate
  modified_base 22: mod_base = OTHER; note = 2'-O-methyluridine-3'-phosphorothioate
  modified_base 23: mod_base = OTHER; note = 2'-O-methylcytidine-3'-phosphate
  misc_feature 1..4: note = RNA
  misc_feature 5: note = DNA
  misc_feature 6..23: note = RNA
atgaccacattgccattatgatc

SEQ ID NO: 7846 - DNA, 23 bp, synthetic construct
  source 1..23: mol_type = other DNA
  modified_base 1: mod_base = OTHER; note = 2'-O-methyladenosine-3'-phosphorothioate
  modified_base 2: mod_base = OTHER; note = 2'-fluorouridine -3'-phosphorothioate
  modified_base 3: mod_base = OTHER; note = 2'-O-methylcytidine-3'-phosphate
  modified_base 4: mod_base = OTHER; note = 2'-O-methyluridine-3'-phosphate
  modified_base 6: mod_base = OTHER; note = 2'-O-methylguanosine-3'-phosphate
  modified_base 7: mod_base = OTHER; note = Adenosine-glycol nucleic acid (GNA)
  modified_base 8: mod_base = OTHER; note = 2'-O-methylcytidine-3'-phosphate
  modified_base 9: mod_base = OTHER; note = 2'-O-methylcytidine-3'-phosphate
  modified_base 10: mod_base = OTHER; note = 2'-O-methyladenosine-3'-phosphate
  modified_base 11: mod_base = OTHER; note = 2'-O-methylcytidine-3'-phosphate
  modified_base 12: mod_base = OTHER; note = 2'-O-methyladenosine-3'-phosphate
  modified_base 13: mod_base = OTHER; note = 2'-O-methyluridine-3'-phosphate
  modified_base 14: mod_base = OTHER; note = 2'-fluorouridine-3'-phosphate
  modified_base 15: mod_base = OTHER; note = 2'-O-methylguanosine-3'-phosphate
  modified_base 16: mod_base = OTHER; note = 2'-fluorocytidine-3'-phosphate
  modified_base 17: mod_base = OTHER; note = 2'-O-methylcytidine-3'-phosphate
  modified_base 18: mod_base = OTHER; note = 2'-O-methyladenosine-3'-phosphate
  modified_base 19: mod_base = OTHER; note = 2'-O-methyluridine-3'-phosphate
  modified_base 20: mod_base = OTHER; note = 2'-O-methyluridine-3'-phosphate
  modified_base 21: mod_base = OTHER; note = 2'-O-methyladenosine-3'-phosphorothioate
  modified_base 22: mod_base = OTHER; note = 2'-O-methyluridine-3'-phosphorothioate
  modified_base 23: mod_base = OTHER; note = 2'-O-methylguanosine-3'-phosphate
  misc_feature 1..4: note = RNA
  misc_feature 5: note = DNA
  misc_feature 6..23: note = RNA
atcttgaccacattgccattatg

SEQ ID NO: 7847 - DNA, 23 bp, synthetic construct
  source 1..23: mol_type = other DNA
  modified_base 1: mod_base = OTHER; note = 2'-O-methyladenosine-3'-phosphorothioate
  modified_base 2: mod_base = OTHER; note = 2'-fluorocytidine-3'-phosphorothioate
  modified_base 3: mod_base = OTHER; note = 2'-O-methylguanosine-3'-phosphate
  modified_base 4: mod_base = OTHER; note = 2'-O-methyluridine-3'-phosphate
  modified_base 6: mod_base = OTHER; note = 2'-O-methyluridine-3'-phosphate
  modified_base 7: mod_base = OTHER; note = Thymidine-glycol nucleic acid (GNA) S-Isomer
  modified_base 8: mod_base = OTHER; note = 2'-O-methylguanosine-3'-phosphate
  modified_base 9: mod_base = OTHER; note = 2'-O-methyladenosine-3'-phosphate
  modified_base 10: mod_base = OTHER; note = 2'-O-methylcytidine-3'-phosphate
  modified_base 11: mod_base = OTHER; note = 2'-O-methylcytidine-3'-phosphate
  modified_base 12: mod_base = OTHER; note = 2'-O-methyladenosine-3'-phosphate
  modified_base 13: mod_base = OTHER; note = 2'-O-methylcytidine-3'-phosphate
  modified_base 14: mod_base = OTHER; note = 2'-fluoroadenosine-3'-phosphate
  modified_base 15: mod_base = OTHER; note = 2'-O-methyluridine-3'-phosphate
  modified_base 16: mod_base = OTHER; note = 2'-fluorouridine-3'-phosphate
  modified_base 17: mod_base = OTHER; note = 2'-O-methylguanosine-3'-phosphate
  modified_base 18: mod_base = OTHER; note = 2'-O-methylcytidine-3'-phosphate
  modified_base 19: mod_base = OTHER; note = 2'-O-methylcytidine-3'-phosphate
  modified_base 20: mod_base = OTHER; note = 2'-O-methyladenosine-3'-phosphate
  modified_base 21: mod_base = OTHER; note = 2'-O-methyluridine-3'-phosphorothioate
  modified_base 22: mod_base = OTHER; note = 2'-O-methyluridine-3'-phosphorothioate
  modified_base 23: mod_base = OTHER; note = 2'-O-methyladenosine-3'-phosphate
  misc_feature 1..4: note = RNA
  misc_feature 5: note = DNA
  misc_feature 6: note = RNA
  misc_feature 7: note = DNA
  misc_feature 8..23: note = RNA
acgtcttgaccacattgccatta

SEQ ID NO: 7848 - DNA, 23 bp, synthetic construct
  source 1..23: mol_type = other DNA
  modified_base 1: mod_base = OTHER; note = 2'-O-methyladenosine-3'-phosphorothioate
  modified_base 2: mod_base = OTHER; note = 2'-fluorocytidine-3'-phosphorothioate
  modified_base 3: mod_base = OTHER; note = 2'-O-methylcytidine-3'-phosphate
  modified_base 4: mod_base = OTHER; note = 2'-O-methylguanosine-3'-phosphate
  modified_base 6: mod_base = OTHER; note = 2'-O-methylcytidine-3'-phosphate
  modified_base 7: mod_base = OTHER; note = Thymidine-glycol nucleic acid (GNA) S-Isomer
  modified_base 8: mod_base = OTHER; note = 2'-O-methyluridine-3'-phosphate
  modified_base 9: mod_base = OTHER; note = 2'-O-methylguanosine-3'-phosphate
  modified_base 10: mod_base = OTHER; note = 2'-O-methyladenosine-3'-phosphate
  modified_base 11: mod_base = OTHER; note = 2'-O-methylcytidine-3'-phosphate
  modified_base 12: mod_base = OTHER; note = 2'-O-methylcytidine-3'-phosphate
  modified_base 13: mod_base = OTHER; note = 2'-O-methyladenosine-3'-phosphate
  modified_base 14: mod_base = OTHER; note = 2'-fluorocytidine-3'-phosphate
  modified_base 15: mod_base = OTHER; note = 2'-O-methyladenosine-3'-phosphate
  modified_base 16: mod_base = OTHER; note = 2'-fluorouridine-3'-phosphate
  modified_base 17: mod_base = OTHER; note = 2'-O-methyluridine-3'-phosphate
  modified_base 18: mod_base = OTHER; note = 2'-O-methylguanosine-3'-phosphate
  modified_base 19: mod_base = OTHER; note = 2'-O-methylcytidine-3'-phosphate
  modified_base 20: mod_base = OTHER; note = 2'-O-methylcytidine-3'-phosphate
  modified_base 21: mod_base = OTHER; note = 2'-O-methyladenosine-3'-phosphorothioate
  modified_base 22: mod_base = OTHER; note = 2'-O-methyluridine-3'-phosphorothioate
  modified_base 23: mod_base = OTHER; note = 2'-O-methyluridine-3'-phosphate
  misc_feature 1..4: note = RNA
  misc_feature 5: note = DNA
  misc_feature 6: note = RNA
  misc_feature 7: note = DNA
  misc_feature 8..23: note = RNA
accgtcttgaccacattgccatt

SEQ ID NO: 7849 - DNA, 23 bp, synthetic construct
  source 1..23: mol_type = other DNA
  modified_base 1: mod_base = OTHER; note = 2'-O-methyladenosine-3'-phosphorothioate
  modified_base 2: mod_base = OTHER; note = 2'-fluoroguanosine-3'-phosphorothioate
  modified_base 3: mod_base = OTHER; note = 2'-O-methylguanosine-3'-phosphate
  modified_base 4: mod_base = OTHER; note = 2'-O-methylcytidine-3'-phosphate
  modified_base 6: mod_base = OTHER; note = 2'-O-methylcytidine-3'-phosphate
  modified_base 7: mod_base = OTHER; note = Adenosine-glycol nucleic acid (GNA)
  modified_base 8: mod_base = OTHER; note = 2'-O-methyluridine-3'-phosphate
  modified_base 9: mod_base = OTHER; note = 2'-O-methylcytidine-3'-phosphate
  modified_base 10: mod_base = OTHER; note = 2'-O-methylcytidine-3'-phosphate
  modified_base 11: mod_base = OTHER; note = 2'-O-methylguanosine-3'-phosphate
  modified_base 12: mod_base = OTHER; note = 2'-O-methyluridine-3'-phosphate
  modified_base 13: mod_base = OTHER; note = 2'-O-methylcytidine-3'-phosphate
  modified_base 14: mod_base = OTHER; note = 2'-fluorouridine-3'-phosphate
  modified_base 15: mod_base = OTHER; note = 2'-O-methyluridine-3'-phosphate
  modified_base 16: mod_base = OTHER; note = 2'-fluoroguanosine-3'-phosphate
  modified_base 17: mod_base = OTHER; note = 2'-O-methyladenosine-3'-phosphate
  modified_base 18: mod_base = OTHER; note = 2'-O-methylcytidine-3'-phosphate
  modified_base 19: mod_base = OTHER; note = 2'-O-methylcytidine-3'-phosphate
  modified_base 20: mod_base = OTHER; note = 2'-O-methyladenosine-3'-phosphate
  modified_base 21: mod_base = OTHER; note = 2'-O-methylcytidine-3'-phosphorothioate
  modified_base 22: mod_base = OTHER; note = 2'-O-methyladenosine-3'-phosphorothioate
  modified_base 23: mod_base = OTHER; note = 2'-O-methyluridine-3'-phosphate
  misc_feature 1..4: note = RNA
  misc_feature 5: note = DNA
  misc_feature 6..23: note = RNA
aggcacatccgtcttgaccacat

SEQ ID NO: 7850 - DNA, 23 bp, synthetic construct
  source 1..23: mol_type = other DNA
  modified_base 1: mod_base = OTHER; note = 2'-O-methyladenosine-3'-phosphorothioate
  modified_base 2: mod_base = OTHER; note = 2'-fluorocytidine-3'-phosphorothioate
  modified_base 3: mod_base = OTHER; note = 2'-O-methyluridine-3'-phosphate
  modified_base 4: mod_base = OTHER; note = 2'-O-methylguanosine-3'-phosphate
  modified_base 6: mod_base = OTHER; note = 2'-O-methylcytidine-3'-phosphate
  modified_base 7: mod_base = OTHER; note = Adenosine-glycol nucleic acid (GNA)
  modified_base 8: mod_base = OTHER; note = 2'-O-methylcytidine-3'-phosphate
  modified_base 9: mod_base = OTHER; note = 2'-O-methyladenosine-3'-phosphate
  modified_base 10: mod_base = OTHER; note = 2'-O-methyluridine-3'-phosphate
  modified_base 11: mod_base = OTHER; note = 2'-O-methylcytidine-3'-phosphate
  modified_base 12: mod_base = OTHER; note = 2'-O-methylcytidine-3'-phosphate
  modified_base 13: mod_base = OTHER; note = 2'-O-methylguanosine-3'-phosphate
  modified_base 14: mod_base = OTHER; note = 2'-fluorouridine-3'-phosphate
  modified_base 15: mod_base = OTHER; note = 2'-O-methylcytidine-3'-phosphate
  modified_base 16: mod_base = OTHER; note = 2'-fluorouridine-3'-phosphate
  modified_base 17: mod_base = OTHER; note = 2'-O-methyluridine-3'-phosphate
  modified_base 18: mod_base = OTHER; note = 2'-O-methylguanosine-3'-phosphate
  modified_base 19: mod_base = OTHER; note = 2'-O-methyladenosine-3'-phosphate
  modified_base 20: mod_base = OTHER; note = 2'-O-methylcytidine-3'-phosphate
  modified_base 21: mod_base = OTHER; note = 2'-O-methylcytidine-3'-phosphorothioate
  modified_base 22: mod_base = OTHER; note = 2'-O-methyladenosine-3'-phosphorothioate
  modified_base 23: mod_base = OTHER; note = 2'-O-methylcytidine-3'-phosphate
  misc_feature 1..4: note = RNA
  misc_feature 5: note = DNA
  misc_feature 6..23: note = RNA
actggcacatccgtcttgaccac

SEQ ID NO: 7851 - DNA, 23 bp, synthetic construct
  source 1..23: mol_type = other DNA
  modified_base 1: mod_base = OTHER; note = 2'-O-methyladenosine-3'-phosphorothioate
  modified_base 2: mod_base = OTHER; note = 2'-fluoroadenosine-3'-phosphorothioate
  modified_base 3: mod_base = OTHER; note = 2'-O-methyluridine-3'-phosphate
  modified_base 4: mod_base = OTHER; note = 2'-O-methyladenosine-3'-phosphate
  modified_base 6: mod_base = OTHER; note = 2'-O-methylcytidine-3'-phosphate
  modified_base 7: mod_base = OTHER; note = Thymidine-glycol nucleic acid (GNA) S-Isomer
  modified_base 8: mod_base = OTHER; note = 2'-O-methylguanosine-3'-phosphate
  modified_base 9: mod_base = OTHER; note = 2'-O-methylguanosine-3'-phosphate
  modified_base 10: mod_base = OTHER; note = 2'-O-methylcytidine-3'-phosphate
  modified_base 11: mod_base = OTHER; note = 2'-O-methyladenosine-3'-phosphate
  modified_base 12: mod_base = OTHER; note = 2'-O-methylcytidine-3'-phosphate
  modified_base 13: mod_base = OTHER; note = 2'-O-methyladenosine-3'-phosphate
  modified_base 14: mod_base = OTHER; note = 2'-fluorouridine-3'-phosphate
  modified_base 15: mod_base = OTHER; note = 2'-O-methylcytidine-3'-phosphate
  modified_base 16: mod_base = OTHER; note = 2'-fluorocytidine-3'-phosphate
  modified_base 17: mod_base = OTHER; note = 2'-O-methylguanosine-3'-phosphate
  modified_base 18: mod_base = OTHER; note = 2'-O-methyluridine-3'-phosphate
  modified_base 19: mod_base = OTHER; note = 2'-O-methylcytidine-3'-phosphate
  modified_base 20: mod_base = OTHER; note = 2'-O-methyluridine-3'-phosphate
  modified_base 21: mod_base = OTHER; note = 2'-O-methyluridine-3'-phosphorothioate
  modified_base 22: mod_base = OTHER; note = 2'-O-methylguanosine-3'-phosphorothioate
  modified_base 23: mod_base = OTHER; note = 2'-O-methyladenosine-3'-phosphate
  misc_feature 1..4: note = RNA
  misc_feature 5: note = DNA
  misc_feature 6: note = RNA
  misc_feature 7: note = DNA
  misc_feature 8..23: note = RNA
aatatctggcacatccgtcttga

SEQ ID NO: 7852 - DNA, 23 bp, synthetic construct
  source 1..23: mol_type = other DNA
  modified_base 1: mod_base = OTHER; note = 2'-O-methyladenosine-3'-phosphorothioate
  modified_base 2: mod_base = OTHER; note = 2'-fluoroguanosine-3'-phosphorothioate
  modified_base 3: mod_base = OTHER; note = 2'-O-methylcytidine-3'-phosphate
  modified_base 4: mod_base = OTHER; note = 2'-O-methylcytidine-3'-phosphate
  modified_base 6: mod_base = OTHER; note = 2'-O-methylcytidine-3'-phosphate
  modified_base 7: mod_base = OTHER; note = Adenosine-glycol nucleic acid (GNA)
  modified_base 8: mod_base = OTHER; note = 2'-O-methylguanosine-3'-phosphate
  modified_base 9: mod_base = OTHER; note = 2'-O-methylguanosine-3'-phosphate
  modified_base 10: mod_base = OTHER; note = 2'-O-methylcytidine-3'-phosphate
  modified_base 11: mod_base = OTHER; note = 2'-O-methylcytidine-3'-phosphate
  modified_base 12: mod_base = OTHER; note = 2'-O-methyluridine-3'-phosphate
  modified_base 13: mod_base = OTHER; note = 2'-O-methylcytidine-3'-phosphate
  modified_base 14: mod_base = OTHER; note = 2'-fluorocytidine-3'-phosphate
  modified_base 15: mod_base = OTHER; note = 2'-O-methyladenosine-3'-phosphate
  modified_base 16: mod_base = OTHER; note = 2'-fluorocytidine-3'-phosphate
  modified_base 17: mod_base = OTHER; note = 2'-O-methylcytidine-3'-phosphate
  modified_base 18: mod_base = OTHER; note = 2'-O-methyladenosine-3'-phosphate
  modified_base 19: mod_base = OTHER; note = 2'-O-methylcytidine-3'-phosphate
  modified_base 20: mod_base = OTHER; note = 2'-O-methylcytidine-3'-phosphate
  modified_base 21: mod_base = OTHER; note = 2'-O-methyladenosine-3'-phosphorothioate
  modified_base 22: mod_base = OTHER; note = 2'-O-methyluridine-3'-phosphorothioate
  modified_base 23: mod_base = OTHER; note = 2'-O-methyladenosine-3'-phosphate
  misc_feature 1..4: note = RNA
  misc_feature 5: note = DNA
  misc_feature 6..23: note = RNA
agccacaggcctccaccaccata

SEQ ID NO: 7853 - DNA, 23 bp, synthetic construct
  source 1..23: mol_type = other DNA
  modified_base 1: mod_base = OTHER; note = 2'-O-methyladenosine-3'-phosphorothioate
  modified_base 2: mod_base = OTHER; note = 2'-fluorouridine -3'-phosphorothioate
  modified_base 3: mod_base = OTHER; note = 2'-O-methyluridine-3'-phosphate
  modified_base 4: mod_base = OTHER; note = 2'-O-methylguanosine-3'-phosphate
  modified_base 6: mod_base = OTHER; note = 2'-O-methyluridine-3'-phosphate
  modified_base 7: mod_base = OTHER; note = Adenosine-glycol nucleic acid (GNA)
  modified_base 8: mod_base = OTHER; note = 2'-O-methylguanosine-3'-phosphate
  modified_base 9: mod_base = OTHER; note = 2'-O-methylcytidine-3'-phosphate
  modified_base 10: mod_base = OTHER; note = 2'-O-methyluridine-3'-phosphate
  modified_base 11: mod_base = OTHER; note = 2'-O-methylguanosine-3'-phosphate
  modified_base 12: mod_base = OTHER; note = 2'-O-methylcytidine-3'-phosphate
  modified_base 13: mod_base = OTHER; note = 2'-O-methyladenosine-3'-phosphate
  modified_base 14: mod_base = OTHER; note = 2'-fluoroguanosine-3'-phosphate
  modified_base 15: mod_base = OTHER; note = 2'-O-methylcytidine-3'-phosphate
  modified_base 16: mod_base = OTHER; note = 2'-fluorocytidine-3'-phosphate
  modified_base 17: mod_base = OTHER; note = 2'-O-methyladenosine-3'-phosphate
  modified_base 18: mod_base = OTHER; note = 2'-O-methylcytidine-3'-phosphate
  modified_base 19: mod_base = OTHER; note = 2'-O-methyladenosine-3'-phosphate
  modified_base 20: mod_base = OTHER; note = 2'-O-methylguanosine-3'-phosphate
  modified_base 21: mod_base = OTHER; note = 2'-O-methylguanosine-3'-phosphorothioate
  modified_base 22: mod_base = OTHER; note = 2'-O-methylcytidine-3'-phosphorothioate
  modified_base 23: mod_base = OTHER; note = 2'-O-methylcytidine-3'-phosphate
  misc_feature 1..4: note = RNA
  misc_feature 5: note = DNA
  misc_feature 6..23: note = RNA
attgctagctgcagccacaggcc

SEQ ID NO: 7854 - DNA, 23 bp, synthetic construct
  source 1..23: mol_type = other DNA
  modified_base 1: mod_base = OTHER; note = 2'-O-methyladenosine-3'-phosphorothioate
  modified_base 2: mod_base = OTHER; note = 2'-fluorocytidine-3'-phosphorothioate
  modified_base 3: mod_base = OTHER; note = 2'-O-methyluridine-3'-phosphate
  modified_base 4: mod_base = OTHER; note = 2'-O-methyluridine-3'-phosphate
  modified_base 6: mod_base = OTHER; note = 2'-O-methylcytidine-3'-phosphate
  modified_base 7: mod_base = OTHER; note = Thymidine-glycol nucleic acid (GNA) S-Isomer
  modified_base 8: mod_base = OTHER; note = 2'-O-methyladenosine-3'-phosphate
  modified_base 9: mod_base = OTHER; note = 2'-O-methylguanosine-3'-phosphate
  modified_base 10: mod_base = OTHER; note = 2'-O-methylcytidine-3'-phosphate
  modified_base 11: mod_base = OTHER; note = 2'-O-methyluridine-3'-phosphate
  modified_base 12: mod_base = OTHER; note = 2'-O-methylguanosine-3'-phosphate
  modified_base 13: mod_base = OTHER; note = 2'-O-methylcytidine-3'-phosphate
  modified_base 14: mod_base = OTHER; note = 2'-fluoroadenosine-3'-phosphate
  modified_base 15: mod_base = OTHER; note = 2'-O-methylguanosine-3'-phosphate
  modified_base 16: mod_base = OTHER; note = 2'-fluorocytidine-3'-phosphate
  modified_base 17: mod_base = OTHER; note = 2'-O-methylcytidine-3'-phosphate
  modified_base 18: mod_base = OTHER; note = 2'-O-methyladenosine-3'-phosphate
  modified_base 19: mod_base = OTHER; note = 2'-O-methylcytidine-3'-phosphate
  modified_base 20: mod_base = OTHER; note = 2'-O-methyladenosine-3'-phosphate
  modified_base 21: mod_base = OTHER; note = 2'-O-methylguanosine-3'-phosphorothioate
  modified_base 22: mod_base = OTHER; note = 2'-O-methylguanosine-3'-phosphorothioate
  modified_base 23: mod_base = OTHER; note = 2'-O-methylcytidine-3'-phosphate
  misc_feature 1..4: note = RNA
  misc_feature 5: note = DNA
  misc_feature 6: note = RNA
  misc_feature 7: note = DNA
  misc_feature 8..23: note = RNA
acttgctagctgcagccacaggc

SEQ ID NO: 7855 - DNA, 23 bp, synthetic construct
  source 1..23: mol_type = other DNA
  modified_base 1: mod_base = OTHER; note = 2'-O-methyladenosine-3'-phosphorothioate
  modified_base 2: mod_base = OTHER; note = 2'-fluorouridine -3'-phosphorothioate
  modified_base 3: mod_base = OTHER; note = 2'-O-methylcytidine-3'-phosphate
  modified_base 4: mod_base = OTHER; note = 2'-O-methylcytidine-3'-phosphate
  modified_base 6: mod_base = OTHER; note = 2'-O-methylcytidine-3'-phosphate
  modified_base 7: mod_base = OTHER; note = Thymidine-glycol nucleic acid (GNA) S-Isomer
  modified_base 8: mod_base = OTHER; note = 2'-O-methyluridine-3'-phosphate
  modified_base 9: mod_base = OTHER; note = 2'-O-methylguanosine-3'-phosphate
  modified_base 10: mod_base = OTHER; note = 2'-O-methylcytidine-3'-phosphate
  modified_base 11: mod_base = OTHER; note = 2'-O-methyluridine-3'-phosphate
  modified_base 12: mod_base = OTHER; note = 2'-O-methyladenosine-3'-phosphate
  modified_base 13: mod_base = OTHER; note = 2'-O-methylguanosine-3'-phosphate
  modified_base 14: mod_base = OTHER; note = 2'-fluorocytidine-3'-phosphate
  modified_base 15: mod_base = OTHER; note = 2'-O-methyluridine-3'-phosphate
  modified_base 16: mod_base = OTHER; note = 2'-fluoroguanosine-3'-phosphate
  modified_base 17: mod_base = OTHER; note = 2'-O-methylcytidine-3'-phosphate
  modified_base 18: mod_base = OTHER; note = 2'-O-methyladenosine-3'-phosphate
  modified_base 19: mod_base = OTHER; note = 2'-O-methylguanosine-3'-phosphate
  modified_base 20: mod_base = OTHER; note = 2'-O-methylcytidine-3'-phosphate
  modified_base 21: mod_base = OTHER; note = 2'-O-methylcytidine-3'-phosphorothioate
  modified_base 22: mod_base = OTHER; note = 2'-O-methyladenosine-3'-phosphorothioate
  modified_base 23: mod_base = OTHER; note = 2'-O-methylcytidine-3'-phosphate
  misc_feature 1..4: note = RNA
  misc_feature 5: note = DNA
  misc_feature 6: note = RNA
  misc_feature 7: note = DNA
  misc_feature 8..23: note = RNA
atcctcttgctagctgcagccac

SEQ ID NO: 7856 - DNA, 23 bp, synthetic construct
  source 1..23: mol_type = other DNA
  modified_base 1: mod_base = OTHER; note = 2'-O-methyladenosine-3'-phosphorothioate
  modified_base 2: mod_base = OTHER; note = 2'-fluoroguanosine-3'-phosphorothioate
  modified_base 3: mod_base = OTHER; note = 2'-O-methylguanosine-3'-phosphate
  modified_base 4: mod_base = OTHER; note = 2'-O-methyluridine-3'-phosphate
  modified_base 6: mod_base = OTHER; note = 2'-O-methylcytidine-3'-phosphate
  modified_base 7: mod_base = OTHER; note = Thymidine-glycol nucleic acid (GNA) S-Isomer
  modified_base 8: mod_base = OTHER; note = 2'-O-methylcytidine-3'-phosphate
  modified_base 9: mod_base = OTHER; note = 2'-O-methyluridine-3'-phosphate
  modified_base 10: mod_base = OTHER; note = 2'-O-methyluridine-3'-phosphate
  modified_base 11: mod_base = OTHER; note = 2'-O-methylguanosine-3'-phosphate
  modified_base 12: mod_base = OTHER; note = 2'-O-methylcytidine-3'-phosphate
  modified_base 13: mod_base = OTHER; note = 2'-O-methyluridine-3'-phosphate
  modified_base 14: mod_base = OTHER; note = 2'-fluoroadenosine-3'-phosphate
  modified_base 15: mod_base = OTHER; note = 2'-O-methylguanosine-3'-phosphate
  modified_base 16: mod_base = OTHER; note = 2'-fluorocytidine-3'-phosphate
  modified_base 17: mod_base = OTHER; note = 2'-O-methyluridine-3'-phosphate
  modified_base 18: mod_base = OTHER; note = 2'-O-methylguanosine-3'-phosphate
  modified_base 19: mod_base = OTHER; note = 2'-O-methylcytidine-3'-phosphate
  modified_base 20: mod_base = OTHER; note = 2'-O-methyladenosine-3'-phosphate
  modified_base 21: mod_base = OTHER; note = 2'-O-methylguanosine-3'-phosphorothioate
  modified_base 22: mod_base = OTHER; note = 2'-O-methylcytidine-3'-phosphorothioate
  modified_base 23: mod_base = OTHER; note = 2'-O-methylcytidine-3'-phosphate
  misc_feature 1..4: note = RNA
  misc_feature 5: note = DNA
  misc_feature 6: note = RNA
  misc_feature 7: note = DNA
  misc_feature 8..23: note = RNA
aggtcctcttgctagctgcagcc

SEQ ID NO: 7857 - DNA, 23 bp, synthetic construct
  source 1..23: mol_type = other DNA
  modified_base 1: mod_base = OTHER; note = 2'-O-methyladenosine-3'-phosphorothioate
  modified_base 2: mod_base = OTHER; note = 2'-fluorocytidine-3'-phosphorothioate
  modified_base 3: mod_base = OTHER; note = 2'-O-methylcytidine-3'-phosphate
  modified_base 4: mod_base = OTHER; note = 2'-O-methyladenosine-3'-phosphate
  modified_base 6: mod_base = OTHER; note = 2'-O-methylguanosine-3'-phosphate
  modified_base 7: mod_base = OTHER; note = Thymidine-glycol nucleic acid (GNA) S-Isomer
  modified_base 8: mod_base = OTHER; note = 2'-O-methylcytidine-3'-phosphate
  modified_base 9: mod_base = OTHER; note = 2'-O-methylcytidine-3'-phosphate
  modified_base 10: mod_base = OTHER; note = 2'-O-methyluridine-3'-phosphate
  modified_base 11: mod_base = OTHER; note = 2'-O-methylcytidine-3'-phosphate
  modified_base 12: mod_base = OTHER; note = 2'-O-methyluridine-3'-phosphate
  modified_base 13: mod_base = OTHER; note = 2'-O-methyluridine-3'-phosphate
  modified_base 14: mod_base = OTHER; note = 2'-fluoroguanosine-3'-phosphate
  modified_base 15: mod_base = OTHER; note = 2'-O-methylcytidine-3'-phosphate
  modified_base 16: mod_base = OTHER; note = 2'-fluorouridine-3'-phosphate
  modified_base 17: mod_base = OTHER; note = 2'-O-methyladenosine-3'-phosphate
  modified_base 18: mod_base = OTHER; note = 2'-O-methylguanosine-3'-phosphate
  modified_base 19: mod_base = OTHER; note = 2'-O-methylcytidine-3'-phosphate
  modified_base 20: mod_base = OTHER; note = 2'-O-methyluridine-3'-phosphate
  modified_base 21: mod_base = OTHER; note = 2'-O-methylguanosine-3'-phosphorothioate
  modified_base 22: mod_base = OTHER; note = 2'-O-methylcytidine-3'-phosphorothioate
  modified_base 23: mod_base = OTHER; note = 2'-O-methyladenosine-3'-phosphate
  misc_feature 1..4: note = RNA
  misc_feature 5: note = DNA
  misc_feature 6: note = RNA
  misc_feature 7: note = DNA
  misc_feature 8..23: note = RNA
accaggtcctcttgctagctgca

SEQ ID NO: 7858 - DNA, 23 bp, synthetic construct
  source 1..23: mol_type = other DNA
  modified_base 1: mod_base = OTHER; note = 2'-O-methyladenosine-3'-phosphorothioate
  modified_base 2: mod_base = OTHER; note = 2'-fluorouridine -3'-phosphorothioate
  modified_base 3: mod_base = OTHER; note = 2'-O-methylguanosine-3'-phosphate
  modified_base 4: mod_base = OTHER; note = 2'-O-methylguanosine-3'-phosphate
  modified_base 6: mod_base = OTHER; note = 2'-O-methylcytidine-3'-phosphate
  modified_base 7: mod_base = OTHER; note = Thymidine-glycol nucleic acid (GNA) S-Isomer
  modified_base 8: mod_base = OTHER; note = 2'-O-methylcytidine-3'-phosphate
  modified_base 9: mod_base = OTHER; note = 2'-O-methyluridine-3'-phosphate
  modified_base 10: mod_base = OTHER; note = 2'-O-methyluridine-3'-phosphate
  modified_base 11: mod_base = OTHER; note = 2'-O-methylcytidine-3'-phosphate
  modified_base 12: mod_base = OTHER; note = 2'-O-methyladenosine-3'-phosphate
  modified_base 13: mod_base = OTHER; note = 2'-O-methylcytidine-3'-phosphate
  modified_base 14: mod_base = OTHER; note = 2'-fluorouridine-3'-phosphate
  modified_base 15: mod_base = OTHER; note = 2'-O-methylcytidine-3'-phosphate
  modified_base 16: mod_base = OTHER; note = 2'-fluorocytidine-3'-phosphate
  modified_base 17: mod_base = OTHER; note = 2'-O-methyladenosine-3'-phosphate
  modified_base 18: mod_base = OTHER; note = 2'-O-methyladenosine-3'-phosphate
  modified_base 19: mod_base = OTHER; note = 2'-O-methyladenosine-3'-phosphate
  modified_base 20: mod_base = OTHER; note = 2'-O-methylguanosine-3'-phosphate
  modified_base 21: mod_base = OTHER; note = 2'-O-methylcytidine-3'-phosphorothioate
  modified_base 22: mod_base = OTHER; note = 2'-O-methylcytidine-3'-phosphorothioate
  modified_base 23: mod_base = OTHER; note = 2'-O-methylcytidine-3'-phosphate
  misc_feature 1..4: note = RNA
  misc_feature 5: note = DNA
  misc_feature 6: note = RNA
  misc_feature 7: note = DNA
  misc_feature 8..23: note = RNA
atggtctcttcactccaaagccc

SEQ ID NO: 7859 - DNA, 23 bp, synthetic construct
  source 1..23: mol_type = other DNA
  modified_base 1: mod_base = OTHER; note = 2'-O-methyladenosine-3'-phosphorothioate
  modified_base 2: mod_base = OTHER; note = 2'-fluorocytidine-3'-phosphorothioate
  modified_base 3: mod_base = OTHER; note = 2'-O-methyluridine-3'-phosphate
  modified_base 4: mod_base = OTHER; note = 2'-O-methyluridine-3'-phosphate
  modified_base 6: mod_base = OTHER; note = 2'-O-methylguanosine-3'-phosphate
  modified_base 7: mod_base = OTHER; note = Thymidine-glycol nucleic acid (GNA) S-Isomer
  modified_base 8: mod_base = OTHER; note = 2'-O-methylcytidine-3'-phosphate
  modified_base 9: mod_base = OTHER; note = 2'-O-methyluridine-3'-phosphate
  modified_base 10: mod_base = OTHER; note = 2'-O-methylcytidine-3'-phosphate
  modified_base 11: mod_base = OTHER; note = 2'-O-methyluridine-3'-phosphate
  modified_base 12: mod_base = OTHER; note = 2'-O-methyluridine-3'-phosphate
  modified_base 13: mod_base = OTHER; note = 2'-O-methylcytidine-3'-phosphate
  modified_base 14: mod_base = OTHER; note = 2'-fluoroadenosine-3'-phosphate
  modified_base 15: mod_base = OTHER; note = 2'-O-methylcytidine-3'-phosphate
  modified_base 16: mod_base = OTHER; note = 2'-fluorouridine-3'-phosphate
  modified_base 17: mod_base = OTHER; note = 2'-O-methylcytidine-3'-phosphate
  modified_base 18: mod_base = OTHER; note = 2'-O-methylcytidine-3'-phosphate
  modified_base 19: mod_base = OTHER; note = 2'-O-methyladenosine-3'-phosphate
  modified_base 20: mod_base = OTHER; note = 2'-O-methyladenosine-3'-phosphate
  modified_base 21: mod_base = OTHER; note = 2'-O-methyladenosine-3'-phosphorothioate
  modified_base 22: mod_base = OTHER; note = 2'-O-methylguanosine-3'-phosphorothioate
  modified_base 23: mod_base = OTHER; note = 2'-O-methylcytidine-3'-phosphate
  misc_feature 1..4: note = RNA
  misc_feature 5: note = DNA
  misc_feature 6: note = RNA
  misc_feature 7: note = DNA
  misc_feature 8..23: note = RNA
acttggtctcttcactccaaagc

SEQ ID NO: 7860 - DNA, 23 bp, synthetic construct
  source 1..23: mol_type = other DNA
  modified_base 1: mod_base = OTHER; note = 2'-O-methyladenosine-3'-phosphorothioate
  modified_base 2: mod_base = OTHER; note = 2'-fluorouridine -3'-phosphorothioate
  modified_base 3: mod_base = OTHER; note = 2'-O-methylcytidine-3'-phosphate
  modified_base 4: mod_base = OTHER; note = 2'-O-methyladenosine-3'-phosphate
  modified_base 6: mod_base = OTHER; note = 2'-O-methylcytidine-3'-phosphate
  modified_base 7: mod_base = OTHER; note = Thymidine-glycol nucleic acid (GNA) S-Isomer
  modified_base 8: mod_base = OTHER; note = 2'-O-methyluridine-3'-phosphate
  modified_base 9: mod_base = OTHER; note = 2'-O-methylguanosine-3'-phosphate
  modified_base 10: mod_base = OTHER; note = 2'-O-methylguanosine-3'-phosphate
  modified_base 11: mod_base = OTHER; note = 2'-O-methyluridine-3'-phosphate
  modified_base 12: mod_base = OTHER; note = 2'-O-methylcytidine-3'-phosphate
  modified_base 13: mod_base = OTHER; note = 2'-O-methyluridine-3'-phosphate
  modified_base 14: mod_base = OTHER; note = 2'-fluorocytidine-3'-phosphate
  modified_base 15: mod_base = OTHER; note = 2'-O-methyluridine-3'-phosphate
  modified_base 16: mod_base = OTHER; note = 2'-fluorouridine-3'-phosphate
  modified_base 17: mod_base = OTHER; note = 2'-O-methylcytidine-3'-phosphate
  modified_base 18: mod_base = OTHER; note = 2'-O-methyladenosine-3'-phosphate
  modified_base 19: mod_base = OTHER; note = 2'-O-methylcytidine-3'-phosphate
  modified_base 20: mod_base = OTHER; note = 2'-O-methyluridine-3'-phosphate
  modified_base 21: mod_base = OTHER; note = 2'-O-methylcytidine-3'-phosphorothioate
  modified_base 22: mod_base = OTHER; note = 2'-O-methylcytidine-3'-phosphorothioate
  modified_base 23: mod_base = OTHER; note = 2'-O-methyladenosine-3'-phosphate
  misc_feature 1..4: note = RNA
  misc_feature 5: note = DNA
  misc_feature 6: note = RNA
  misc_feature 7: note = DNA
  misc_feature 8..23: note = RNA
atcatcttggtctcttcactcca

SEQ ID NO: 7861 - DNA, 23 bp, synthetic construct
  source 1..23: mol_type = other DNA
  modified_base 1: mod_base = OTHER; note = 2'-O-methyladenosine-3'-phosphorothioate
  modified_base 2: mod_base = OTHER; note = 2'-fluoroadenosine-3'-phosphorothioate
  modified_base 3: mod_base = OTHER; note = 2'-O-methylcytidine-3'-phosphate
  modified_base 4: mod_base = OTHER; note = 2'-O-methyluridine-3'-phosphate
  modified_base 6: mod_base = OTHER; note = 2'-O-methylcytidine-3'-phosphate
  modified_base 7: mod_base = OTHER; note = Adenosine-glycol nucleic acid (GNA)
  modified_base 8: mod_base = OTHER; note = 2'-O-methyluridine-3'-phosphate
  modified_base 9: mod_base = OTHER; note = 2'-O-methylcytidine-3'-phosphate
  modified_base 10: mod_base = OTHER; note = 2'-O-methyluridine-3'-phosphate
  modified_base 11: mod_base = OTHER; note = 2'-O-methyluridine-3'-phosphate
  modified_base 12: mod_base = OTHER; note = 2'-O-methylguanosine-3'-phosphate
  modified_base 13: mod_base = OTHER; note = 2'-O-methylguanosine-3'-phosphate
  modified_base 14: mod_base = OTHER; note = 2'-fluorouridine-3'-phosphate
  modified_base 15: mod_base = OTHER; note = 2'-O-methylcytidine-3'-phosphate
  modified_base 16: mod_base = OTHER; note = 2'-fluorouridine-3'-phosphate
  modified_base 17: mod_base = OTHER; note = 2'-O-methylcytidine-3'-phosphate
  modified_base 18: mod_base = OTHER; note = 2'-O-methyluridine-3'-phosphate
  modified_base 19: mod_base = OTHER; note = 2'-O-methyluridine-3'-phosphate
  modified_base 20: mod_base = OTHER; note = 2'-O-methylcytidine-3'-phosphate
  modified_base 21: mod_base = OTHER; note = 2'-O-methyladenosine-3'-phosphorothioate
  modified_base 22: mod_base = OTHER; note = 2'-O-methylcytidine-3'-phosphorothioate
  modified_base 23: mod_base = OTHER; note = 2'-O-methyluridine-3'-phosphate
  misc_feature 1..4: note = RNA
  misc_feature 5: note = DNA
  misc_feature 6..23: note = RNA
aacttcatcttggtctcttcact

SEQ ID NO: 7862 - DNA, 23 bp, synthetic construct
  source 1..23: mol_type = other DNA
  modified_base 1: mod_base = OTHER; note = 2'-O-methyladenosine-3'-phosphorothioate
  modified_base 2: mod_base = OTHER; note = 2'-fluoroguanosine-3'-phosphorothioate
  modified_base 3: mod_base = OTHER; note = 2'-O-methyladenosine-3'-phosphate
  modified_base 4: mod_base = OTHER; note = 2'-O-methyladenosine-3'-phosphate
  modified_base 6: mod_base = OTHER; note = 2'-O-methylcytidine-3'-phosphate
  modified_base 7: mod_base = OTHER; note = Thymidine-glycol nucleic acid (GNA) S-Isomer
  modified_base 8: mod_base = OTHER; note = 2'-O-methyluridine-3'-phosphate
  modified_base 9: mod_base = OTHER; note = 2'-O-methylcytidine-3'-phosphate
  modified_base 10: mod_base = OTHER; note = 2'-O-methyladenosine-3'-phosphate
  modified_base 11: mod_base = OTHER; note = 2'-O-methyluridine-3'-phosphate
  modified_base 12: mod_base = OTHER; note = 2'-O-methylcytidine-3'-phosphate
  modified_base 13: mod_base = OTHER; note = 2'-O-methyluridine-3'-phosphate
  modified_base 14: mod_base = OTHER; note = 2'-fluorouridine-3'-phosphate
  modified_base 15: mod_base = OTHER; note = 2'-O-methylguanosine-3'-phosphate
  modified_base 16: mod_base = OTHER; note = 2'-fluoroguanosine-3'-phosphate
  modified_base 17: mod_base = OTHER; note = 2'-O-methyluridine-3'-phosphate
  modified_base 18: mod_base = OTHER; note = 2'-O-methylcytidine-3'-phosphate
  modified_base 19: mod_base = OTHER; note = 2'-O-methyluridine-3'-phosphate
  modified_base 20: mod_base = OTHER; note = 2'-O-methylcytidine-3'-phosphate
  modified_base 21: mod_base = OTHER; note = 2'-O-methyluridine-3'-phosphorothioate
  modified_base 22: mod_base = OTHER; note = 2'-O-methyluridine-3'-phosphorothioate
  modified_base 23: mod_base = OTHER; note = 2'-O-methylcytidine-3'-phosphate
  misc_feature 1..4: note = RNA
  misc_feature 5: note = DNA
  misc_feature 6: note = RNA
  misc_feature 7: note = DNA
  misc_feature 8..23: note = RNA
agaaacttcatcttggtctcttc

SEQ ID NO: 7863 - DNA, 23 bp, synthetic construct
  source 1..23: mol_type = other DNA
  modified_base 1: mod_base = OTHER; note = 2'-O-methyladenosine-3'-phosphorothioate
  modified_base 2: mod_base = OTHER; note = 2'-fluoroguanosine-3'-phosphorothioate
  modified_base 3: mod_base = OTHER; note = 2'-O-methyluridine-3'-phosphate
  modified_base 4: mod_base = OTHER; note = 2'-O-methylguanosine-3'-phosphate
  modified_base 6: mod_base = OTHER; note = 2'-O-methylcytidine-3'-phosphate
  modified_base 7: mod_base = OTHER; note = Thymidine-glycol nucleic acid (GNA) S-Isomer
  modified_base 8: mod_base = OTHER; note = 2'-O-methylguanosine-3'-phosphate
  modified_base 9: mod_base = OTHER; note = 2'-O-methylguanosine-3'-phosphate
  modified_base 10: mod_base = OTHER; note = 2'-O-methylguanosine-3'-phosphate
  modified_base 11: mod_base = OTHER; note = 2'-O-methyladenosine-3'-phosphate
  modified_base 12: mod_base = OTHER; note = 2'-O-methyladenosine-3'-phosphate
  modified_base 13: mod_base = OTHER; note = 2'-O-methyladenosine-3'-phosphate
  modified_base 14: mod_base = OTHER; note = 2'-fluorocytidine-3'-phosphate
  modified_base 15: mod_base = OTHER; note = 2'-O-methyluridine-3'-phosphate
  modified_base 16: mod_base = OTHER; note = 2'-fluorouridine-3'-phosphate
  modified_base 17: mod_base = OTHER; note = 2'-O-methylcytidine-3'-phosphate
  modified_base 18: mod_base = OTHER; note = 2'-O-methyladenosine-3'-phosphate
  modified_base 19: mod_base = OTHER; note = 2'-O-methyluridine-3'-phosphate
  modified_base 20: mod_base = OTHER; note = 2'-O-methylcytidine-3'-phosphate
  modified_base 21: mod_base = OTHER; note = 2'-O-methyluridine-3'-phosphorothioate
  modified_base 22: mod_base = OTHER; note = 2'-O-methyluridine-3'-phosphorothioate
  modified_base 23: mod_base = OTHER; note = 2'-O-methylguanosine-3'-phosphate
  misc_feature 1..4: note = RNA
  misc_feature 5: note = DNA
  misc_feature 6: note = RNA
  misc_feature 7: note = DNA
  misc_feature 8..23: note = RNA
agtgcctgggaaacttcatcttg

SEQ ID NO: 7864 - DNA, 23 bp, synthetic construct
  source 1..23: mol_type = other DNA
  modified_base 1: mod_base = OTHER; note = 2'-O-methyladenosine-3'-phosphorothioate
  modified_base 2: mod_base = OTHER; note = 2'-fluorocytidine-3'-phosphorothioate
  modified_base 3: mod_base = OTHER; note = 2'-O-methylcytidine-3'-phosphate
  modified_base 4: mod_base = OTHER; note = 2'-O-methylcytidine-3'-phosphate
  modified_base 6: mod_base = OTHER; note = 2'-O-methylguanosine-3'-phosphate
  modified_base 7: mod_base = OTHER; note = Thymidine-glycol nucleic acid (GNA) S-Isomer
  modified_base 8: mod_base = OTHER; note = 2'-O-methylguanosine-3'-phosphate
  modified_base 9: mod_base = OTHER; note = 2'-O-methylcytidine-3'-phosphate
  modified_base 10: mod_base = OTHER; note = 2'-O-methylcytidine-3'-phosphate
  modified_base 11: mod_base = OTHER; note = 2'-O-methyluridine-3'-phosphate
  modified_base 12: mod_base = OTHER; note = 2'-O-methylguanosine-3'-phosphate
  modified_base 13: mod_base = OTHER; note = 2'-O-methylguanosine-3'-phosphate
  modified_base 14: mod_base = OTHER; note = 2'-fluoroguanosine-3'-phosphate
  modified_base 15: mod_base = OTHER; note = 2'-O-methyladenosine-3'-phosphate
  modified_base 16: mod_base = OTHER; note = 2'-fluoroadenosine-3'-phosphate
  modified_base 17: mod_base = OTHER; note = 2'-O-methyladenosine-3'-phosphate
  modified_base 18: mod_base = OTHER; note = 2'-O-methylcytidine-3'-phosphate
  modified_base 19: mod_base = OTHER; note = 2'-O-methyluridine-3'-phosphate
  modified_base 20: mod_base = OTHER; note = 2'-O-methyluridine-3'-phosphate
  modified_base 21: mod_base = OTHER; note = 2'-O-methylcytidine-3'-phosphorothioate
  modified_base 22: mod_base = OTHER; note = 2'-O-methyladenosine-3'-phosphorothioate
  modified_base 23: mod_base = OTHER; note = 2'-O-methyluridine-3'-phosphate
  misc_feature 1..4: note = RNA
  misc_feature 5: note = DNA
  misc_feature 6: note = RNA
  misc_feature 7: note = DNA
  misc_feature 8..23: note = RNA
accctgtgcctgggaaacttcat

SEQ ID NO: 7865 - DNA, 23 bp, synthetic construct
  source 1..23: mol_type = other DNA
  modified_base 1: mod_base = OTHER; note = 2'-O-methyladenosine-3'-phosphorothioate
  modified_base 2: mod_base = OTHER; note = 2'-fluorouridine -3'-phosphorothioate
  modified_base 3: mod_base = OTHER; note = 2'-O-methyluridine-3'-phosphate
  modified_base 4: mod_base = OTHER; note = 2'-O-methylguanosine-3'-phosphate
  modified_base 6: mod_base = OTHER; note = 2'-O-methylcytidine-3'-phosphate
  modified_base 7: mod_base = OTHER; note = Adenosine-glycol nucleic acid (GNA)
  modified_base 8: mod_base = OTHER; note = 2'-O-methylguanosine-3'-phosphate
  modified_base 9: mod_base = OTHER; note = 2'-O-methylguanosine-3'-phosphate
  modified_base 10: mod_base = OTHER; note = 2'-O-methyluridine-3'-phosphate
  modified_base 11: mod_base = OTHER; note = 2'-O-methylguanosine-3'-phosphate
  modified_base 12: mod_base = OTHER; note = 2'-O-methylguanosine-3'-phosphate
  modified_base 13: mod_base = OTHER; note = 2'-O-methyluridine-3'-phosphate
  modified_base 14: mod_base = OTHER; note = 2'-fluorouridine-3'-phosphate
  modified_base 15: mod_base = OTHER; note = 2'-O-methylguanosine-3'-phosphate
  modified_base 16: mod_base = OTHER; note = 2'-fluorouridine-3'-phosphate
  modified_base 17: mod_base = OTHER; note = 2'-O-methyluridine-3'-phosphate
  modified_base 18: mod_base = OTHER; note = 2'-O-methylguanosine-3'-phosphate
  modified_base 19: mod_base = OTHER; note = 2'-O-methylguanosine-3'-phosphate
  modified_base 20: mod_base = OTHER; note = 2'-O-methylguanosine-3'-phosphate
  modified_base 21: mod_base = OTHER; note = 2'-O-methyluridine-3'-phosphorothioate
  modified_base 22: mod_base = OTHER; note = 2'-O-methyluridine-3'-phosphorothioate
  modified_base 23: mod_base = OTHER; note = 2'-O-methylguanosine-3'-phosphate
  misc_feature 1..4: note = RNA
  misc_feature 5: note = DNA
  misc_feature 6..23: note = RNA
attgccaggtggttgttgggttg

SEQ ID NO: 7866 - DNA, 23 bp, synthetic construct
  source 1..23: mol_type = other DNA
  modified_base 1: mod_base = OTHER; note = 2'-O-methyladenosine-3'-phosphorothioate
  modified_base 2: mod_base = OTHER; note = 2'-fluoroadenosine-3'-phosphorothioate
  modified_base 3: mod_base = OTHER; note = 2'-O-methylguanosine-3'-phosphate
  modified_base 4: mod_base = OTHER; note = 2'-O-methyluridine-3'-phosphate
  modified_base 6: mod_base = OTHER; note = 2'-O-methyladenosine-3'-phosphate
  modified_base 7: mod_base = OTHER; note = Thymidine-glycol nucleic acid (GNA) S-Isomer
  modified_base 8: mod_base = OTHER; note = 2'-O-methyladenosine-3'-phosphate
  modified_base 9: mod_base = OTHER; note = 2'-O-methyluridine-3'-phosphate
  modified_base 10: mod_base = OTHER; note = 2'-O-methyluridine-3'-phosphate
  modified_base 11: mod_base = OTHER; note = 2'-O-methylguanosine-3'-phosphate
  modified_base 12: mod_base = OTHER; note = 2'-O-methylcytidine-3'-phosphate
  modified_base 13: mod_base = OTHER; note = 2'-O-methylcytidine-3'-phosphate
  modified_base 14: mod_base = OTHER; note = 2'-fluoroadenosine-3'-phosphate
  modified_base 15: mod_base = OTHER; note = 2'-O-methylguanosine-3'-phosphate
  modified_base 16: mod_base = OTHER; note = 2'-fluoroguanosine-3'-phosphate
  modified_base 17: mod_base = OTHER; note = 2'-O-methyluridine-3'-phosphate
  modified_base 18: mod_base = OTHER; note = 2'-O-methylguanosine-3'-phosphate
  modified_base 19: mod_base = OTHER; note = 2'-O-methylguanosine-3'-phosphate
  modified_base 20: mod_base = OTHER; note = 2'-O-methyluridine-3'-phosphate
  modified_base 21: mod_base = OTHER; note = 2'-O-methyluridine-3'-phosphorothioate
  modified_base 22: mod_base = OTHER; note = 2'-O-methylguanosine-3'-phosphorothioate
  modified_base 23: mod_base = OTHER; note = 2'-O-methyluridine-3'-phosphate
  misc_feature 1..4: note = RNA
  misc_feature 5: note = DNA
  misc_feature 6: note = RNA
  misc_feature 7: note = DNA
  misc_feature 8..23: note = RNA
aagtcatattgccaggtggttgt

SEQ ID NO: 7867 - DNA, 23 bp, synthetic construct
  source 1..23: mol_type = other DNA
  modified_base 1: mod_base = OTHER; note = 2'-O-methyladenosine-3'-phosphorothioate
  modified_base 2: mod_base = OTHER; note = 2'-fluoroguanosine-3'-phosphorothioate
  modified_base 3: mod_base = OTHER; note = 2'-O-methyladenosine-3'-phosphate
  modified_base 4: mod_base = OTHER; note = 2'-O-methylguanosine-3'-phosphate
  modified_base 6: mod_base = OTHER; note = 2'-O-methylcytidine-3'-phosphate
  modified_base 7: mod_base = OTHER; note = Adenosine-glycol nucleic acid (GNA)
  modified_base 8: mod_base = OTHER; note = 2'-O-methyluridine-3'-phosphate
  modified_base 9: mod_base = OTHER; note = 2'-O-methyladenosine-3'-phosphate
  modified_base 10: mod_base = OTHER; note = 2'-O-methyluridine-3'-phosphate
  modified_base 11: mod_base = OTHER; note = 2'-O-methyluridine-3'-phosphate
  modified_base 12: mod_base = OTHER; note = 2'-O-methylguanosine-3'-phosphate
  modified_base 13: mod_base = OTHER; note = 2'-O-methylcytidine-3'-phosphate
  modified_base 14: mod_base = OTHER; note = 2'-fluorocytidine-3'-phosphate
  modified_base 15: mod_base = OTHER; note = 2'-O-methyladenosine-3'-phosphate
  modified_base 16: mod_base = OTHER; note = 2'-fluoroguanosine-3'-phosphate
  modified_base 17: mod_base = OTHER; note = 2'-O-methylguanosine-3'-phosphate
  modified_base 18: mod_base = OTHER; note = 2'-O-methyluridine-3'-phosphate
  modified_base 19: mod_base = OTHER; note = 2'-O-methylguanosine-3'-phosphate
  modified_base 20: mod_base = OTHER; note = 2'-O-methylguanosine-3'-phosphate
  modified_base 21: mod_base = OTHER; note = 2'-O-methyluridine-3'-phosphorothioate
  modified_base 22: mod_base = OTHER; note = 2'-O-methyluridine-3'-phosphorothioate
  modified_base 23: mod_base = OTHER; note = 2'-O-methylguanosine-3'-phosphate
  misc_feature 1..4: note = RNA
  misc_feature 5: note = DNA
  misc_feature 6..23: note = RNA
agagtcatattgccaggtggttg

SEQ ID NO: 7868 - DNA, 23 bp, synthetic construct
  source 1..23: mol_type = other DNA
  modified_base 1: mod_base = OTHER; note = 2'-O-methyladenosine-3'-phosphorothioate
  modified_base 2: mod_base = OTHER; note = 2'-fluoroguanosine-3'-phosphorothioate
  modified_base 3: mod_base = OTHER; note = 2'-O-methyluridine-3'-phosphate
  modified_base 4: mod_base = OTHER; note = 2'-O-methylguanosine-3'-phosphate
  modified_base 6: mod_base = OTHER; note = 2'-O-methylguanosine-3'-phosphate
  modified_base 7: mod_base = OTHER; note = Thymidine-glycol nucleic acid (GNA) S-Isomer
  modified_base 8: mod_base = OTHER; note = 2'-O-methylcytidine-3'-phosphate
  modified_base 9: mod_base = OTHER; note = 2'-O-methyladenosine-3'-phosphate
  modified_base 10: mod_base = OTHER; note = 2'-O-methyluridine-3'-phosphate
  modified_base 11: mod_base = OTHER; note = 2'-O-methyladenosine-3'-phosphate
  modified_base 12: mod_base = OTHER; note = 2'-O-methyluridine-3'-phosphate
  modified_base 13: mod_base = OTHER; note = 2'-O-methyluridine-3'-phosphate
  modified_base 14: mod_base = OTHER; note = 2'-fluoroguanosine-3'-phosphate
  modified_base 15: mod_base = OTHER; note = 2'-O-methylcytidine-3'-phosphate
  modified_base 16: mod_base = OTHER; note = 2'-fluorocytidine-3'-phosphate
  modified_base 17: mod_base = OTHER; note = 2'-O-methyladenosine-3'-phosphate
  modified_base 18: mod_base = OTHER; note = 2'-O-methylguanosine-3'-phosphate
  modified_base 19: mod_base = OTHER; note = 2'-O-methylguanosine-3'-phosphate
  modified_base 20: mod_base = OTHER; note = 2'-O-methyluridine-3'-phosphate
  modified_base 21: mod_base = OTHER; note = 2'-O-methylguanosine-3'-phosphorothioate
  modified_base 22: mod_base = OTHER; note = 2'-O-methylguanosine-3'-phosphorothioate
  modified_base 23: mod_base = OTHER; note = 2'-O-methyluridine-3'-phosphate
  misc_feature 1..4: note = RNA
  misc_feature 5: note = DNA
  misc_feature 6: note = RNA
  misc_feature 7: note = DNA
  misc_feature 8..23: note = RNA
agtgagtcatattgccaggtggt

SEQ ID NO: 7869 - DNA, 23 bp, synthetic construct
  source 1..23: mol_type = other DNA
  modified_base 1: mod_base = OTHER; note = 2'-O-methyladenosine-3'-phosphorothioate
  modified_base 2: mod_base = OTHER; note = 2'-fluoroadenosine-3'-phosphorothioate
  modified_base 3: mod_base = OTHER; note = 2'-O-methyladenosine-3'-phosphate
  modified_base 4: mod_base = OTHER; note = 2'-O-methylguanosine-3'-phosphate
  modified_base 6: mod_base = OTHER; note = 2'-O-methylguanosine-3'-phosphate
  modified_base 7: mod_base = OTHER; note = Adenosine-glycol nucleic acid (GNA)
  modified_base 8: mod_base = OTHER; note = 2'-O-methylguanosine-3'-phosphate
  modified_base 9: mod_base = OTHER; note = 2'-O-methyluridine-3'-phosphate
  modified_base 10: mod_base = OTHER; note = 2'-O-methylcytidine-3'-phosphate
  modified_base 11: mod_base = OTHER; note = 2'-O-methyladenosine-3'-phosphate
  modified_base 12: mod_base = OTHER; note = 2'-O-methyluridine-3'-phosphate
  modified_base 13: mod_base = OTHER; note = 2'-O-methyladenosine-3'-phosphate
  modified_base 14: mod_base = OTHER; note = 2'-fluorouridine-3'-phosphate
  modified_base 15: mod_base = OTHER; note = 2'-O-methyluridine-3'-phosphate
  modified_base 16: mod_base = OTHER; note = 2'-fluoroguanosine-3'-phosphate
  modified_base 17: mod_base = OTHER; note = 2'-O-methylcytidine-3'-phosphate
  modified_base 18: mod_base = OTHER; note = 2'-O-methylcytidine-3'-phosphate
  modified_base 19: mod_base = OTHER; note = 2'-O-methyladenosine-3'-phosphate
  modified_base 20: mod_base = OTHER; note = 2'-O-methylguanosine-3'-phosphate
  modified_base 21: mod_base = OTHER; note = 2'-O-methylguanosine-3'-phosphorothioate
  modified_base 22: mod_base = OTHER; note = 2'-O-methyluridine-3'-phosphorothioate
  modified_base 23: mod_base = OTHER; note = 2'-O-methylguanosine-3'-phosphate
  misc_feature 1..4: note = RNA
  misc_feature 5: note = DNA
  misc_feature 6..23: note = RNA
aaagtgagtcatattgccaggtg

SEQ ID NO: 7870 - DNA, 23 bp, synthetic construct
  source 1..23: mol_type = other DNA
  modified_base 1: mod_base = OTHER; note = 2'-O-methyladenosine-3'-phosphorothioate
  modified_base 2: mod_base = OTHER; note = 2'-fluorouridine -3'-phosphorothioate
  modified_base 3: mod_base = OTHER; note = 2'-O-methylcytidine-3'-phosphate
  modified_base 4: mod_base = OTHER; note = 2'-O-methyladenosine-3'-phosphate
  modified_base 6: mod_base = OTHER; note = 2'-O-methylguanosine-3'-phosphate
  modified_base 7: mod_base = OTHER; note = Thymidine-glycol nucleic acid (GNA) S-Isomer
  modified_base 8: mod_base = OTHER; note = 2'-O-methylguanosine-3'-phosphate
  modified_base 9: mod_base = OTHER; note = 2'-O-methyladenosine-3'-phosphate
  modified_base 10: mod_base = OTHER; note = 2'-O-methylguanosine-3'-phosphate
  modified_base 11: mod_base = OTHER; note = 2'-O-methyluridine-3'-phosphate
  modified_base 12: mod_base = OTHER; note = 2'-O-methylcytidine-3'-phosphate
  modified_base 13: mod_base = OTHER; note = 2'-O-methyladenosine-3'-phosphate
  modified_base 14: mod_base = OTHER; note = 2'-fluorouridine-3'-phosphate
  modified_base 15: mod_base = OTHER; note = 2'-O-methyladenosine-3'-phosphate
  modified_base 16: mod_base = OTHER; note = 2'-fluorouridine-3'-phosphate
  modified_base 17: mod_base = OTHER; note = 2'-O-methyluridine-3'-phosphate
  modified_base 18: mod_base = OTHER; note = 2'-O-methylguanosine-3'-phosphate
  modified_base 19: mod_base = OTHER; note = 2'-O-methylcytidine-3'-phosphate
  modified_base 20: mod_base = OTHER; note = 2'-O-methylcytidine-3'-phosphate
  modified_base 21: mod_base = OTHER; note = 2'-O-methyladenosine-3'-phosphorothioate
  modified_base 22: mod_base = OTHER; note = 2'-O-methylguanosine-3'-phosphorothioate
  modified_base 23: mod_base = OTHER; note = 2'-O-methylguanosine-3'-phosphate
  misc_feature 1..4: note = RNA
  misc_feature 5: note = DNA
  misc_feature 6: note = RNA
  misc_feature 7: note = DNA
  misc_feature 8..23: note = RNA
atcaagtgagtcatattgccagg

SEQ ID NO: 7871 - DNA, 23 bp, synthetic construct
  source 1..23: mol_type = other DNA
  modified_base 1: mod_base = OTHER; note = 2'-O-methyladenosine-3'-phosphorothioate
  modified_base 2: mod_base = OTHER; note = 2'-fluoroguanosine-3'-phosphorothioate
  modified_base 3: mod_base = OTHER; note = 2'-O-methylguanosine-3'-phosphate
  modified_base 4: mod_base = OTHER; note = 2'-O-methyluridine-3'-phosphate
  modified_base 6: mod_base = OTHER; note = 2'-O-methyladenosine-3'-phosphate
  modified_base 7: mod_base = OTHER; note = Adenosine-glycol nucleic acid (GNA)
  modified_base 8: mod_base = OTHER; note = 2'-O-methylguanosine-3'-phosphate
  modified_base 9: mod_base = OTHER; note = 2'-O-methyluridine-3'-phosphate
  modified_base 10: mod_base = OTHER; note = 2'-O-methylguanosine-3'-phosphate
  modified_base 11: mod_base = OTHER; note = 2'-O-methyladenosine-3'-phosphate
  modified_base 12: mod_base = OTHER; note = 2'-O-methylguanosine-3'-phosphate
  modified_base 13: mod_base = OTHER; note = 2'-O-methyluridine-3'-phosphate
  modified_base 14: mod_base = OTHER; note = 2'-fluorocytidine-3'-phosphate
  modified_base 15: mod_base = OTHER; note = 2'-O-methyladenosine-3'-phosphate
  modified_base 16: mod_base = OTHER; note = 2'-fluorouridine-3'-phosphate
  modified_base 17: mod_base = OTHER; note = 2'-O-methyladenosine-3'-phosphate
  modified_base 18: mod_base = OTHER; note = 2'-O-methyluridine-3'-phosphate
  modified_base 19: mod_base = OTHER; note = 2'-O-methyluridine-3'-phosphate
  modified_base 20: mod_base = OTHER; note = 2'-O-methylguanosine-3'-phosphate
  modified_base 21: mod_base = OTHER; note = 2'-O-methylcytidine-3'-phosphorothioate
  modified_base 22: mod_base = OTHER; note = 2'-O-methylcytidine-3'-phosphorothioate
  modified_base 23: mod_base = OTHER; note = 2'-O-methyladenosine-3'-phosphate
  misc_feature 1..4: note = RNA
  misc_feature 5: note = DNA
  misc_feature 6..23: note = RNA
aggtcaagtgagtcatattgcca

SEQ ID NO: 7872 - DNA, 23 bp, synthetic construct
  source 1..23: mol_type = other DNA
  modified_base 1: mod_base = OTHER; note = 2'-O-methyladenosine-3'-phosphorothioate
  modified_base 2: mod_base = OTHER; note = 2'-fluoroguanosine-3'-phosphorothioate
  modified_base 3: mod_base = OTHER; note = 2'-O-methyladenosine-3'-phosphate
  modified_base 4: mod_base = OTHER; note = 2'-O-methyladenosine-3'-phosphate
  modified_base 6: mod_base = OTHER; note = 2'-O-methylguanosine-3'-phosphate
  modified_base 7: mod_base = OTHER; note = Thymidine-glycol nucleic acid (GNA) S-Isomer
  modified_base 8: mod_base = OTHER; note = 2'-O-methylguanosine-3'-phosphate
  modified_base 9: mod_base = OTHER; note = 2'-O-methylcytidine-3'-phosphate
  modified_base 10: mod_base = OTHER; note = 2'-O-methylcytidine-3'-phosphate
  modified_base 11: mod_base = OTHER; note = 2'-O-methylcytidine-3'-phosphate
  modified_base 12: mod_base = OTHER; note = 2'-O-methyladenosine-3'-phosphate
  modified_base 13: mod_base = OTHER; note = 2'-O-methyluridine-3'-phosphate
  modified_base 14: mod_base = OTHER; note = 2'-fluorouridine-3'-phosphate
  modified_base 15: mod_base = OTHER; note = 2'-O-methyluridine-3'-phosphate
  modified_base 16: mod_base = OTHER; note = 2'-fluoroguanosine-3'-phosphate
  modified_base 17: mod_base = OTHER; note = 2'-O-methylguanosine-3'-phosphate
  modified_base 18: mod_base = OTHER; note = 2'-O-methylguanosine-3'-phosphate
  modified_base 19: mod_base = OTHER; note = 2'-O-methyluridine-3'-phosphate
  modified_base 20: mod_base = OTHER; note = 2'-O-methylcytidine-3'-phosphate
  modified_base 21: mod_base = OTHER; note = 2'-O-methylcytidine-3'-phosphorothioate
  modified_base 22: mod_base = OTHER; note = 2'-O-methylcytidine-3'-phosphorothioate
  modified_base 23: mod_base = OTHER; note = 2'-O-methyladenosine-3'-phosphate
  misc_feature 1..4: note = RNA
  misc_feature 5: note = DNA
  misc_feature 6: note = RNA
  misc_feature 7: note = DNA
  misc_feature 8..23: note = RNA
agaaagtgcccatttgggtccca

SEQ ID NO: 7873 - DNA, 23 bp, synthetic construct
  source 1..23: mol_type = other DNA
  modified_base 1: mod_base = OTHER; note = 2'-O-methyladenosine-3'-phosphorothioate
  modified_base 2: mod_base = OTHER; note = 2'-fluorocytidine-3'-phosphorothioate
  modified_base 3: mod_base = OTHER; note = 2'-O-methyluridine-3'-phosphate
  modified_base 4: mod_base = OTHER; note = 2'-O-methylcytidine-3'-phosphate
  modified_base 6: mod_base = OTHER; note = 2'-O-methylguanosine-3'-phosphate
  modified_base 7: mod_base = OTHER; note = Adenosine-glycol nucleic acid (GNA)
  modified_base 8: mod_base = OTHER; note = 2'-O-methylcytidine-3'-phosphate
  modified_base 9: mod_base = OTHER; note = 2'-O-methyladenosine-3'-phosphate
  modified_base 10: mod_base = OTHER; note = 2'-O-methyladenosine-3'-phosphate
  modified_base 11: mod_base = OTHER; note = 2'-O-methylguanosine-3'-phosphate
  modified_base 12: mod_base = OTHER; note = 2'-O-methyladenosine-3'-phosphate
  modified_base 13: mod_base = OTHER; note = 2'-O-methyladenosine-3'-phosphate
  modified_base 14: mod_base = OTHER; note = 2'-fluoroadenosine-3'-phosphate
  modified_base 15: mod_base = OTHER; note = 2'-O-methylguanosine-3'-phosphate
  modified_base 16: mod_base = OTHER; note = 2'-fluorouridine-3'-phosphate
  modified_base 17: mod_base = OTHER; note = 2'-O-methylguanosine-3'-phosphate
  modified_base 18: mod_base = OTHER; note = 2'-O-methylcytidine-3'-phosphate
  modified_base 19: mod_base = OTHER; note = 2'-O-methylcytidine-3'-phosphate
  modified_base 20: mod_base = OTHER; note = 2'-O-methylcytidine-3'-phosphate
  modified_base 21: mod_base = OTHER; note = 2'-O-methyladenosine-3'-phosphorothioate
  modified_base 22: mod_base = OTHER; note = 2'-O-methyluridine-3'-phosphorothioate
  modified_base 23: mod_base = OTHER; note = 2'-O-methyluridine-3'-phosphate
  misc_feature 1..4: note = RNA
  misc_feature 5: note = DNA
  misc_feature 6..23: note = RNA
actcagacaagaaagtgcccatt

SEQ ID NO: 7874 - DNA, 23 bp, synthetic construct
  source 1..23: mol_type = other DNA
  modified_base 1: mod_base = OTHER; note = 2'-O-methyladenosine-3'-phosphorothioate
  modified_base 2: mod_base = OTHER; note = 2'-fluoroguanosine-3'-phosphorothioate
  modified_base 3: mod_base = OTHER; note = 2'-O-methyluridine-3'-phosphate
  modified_base 4: mod_base = OTHER; note = 2'-O-methylcytidine-3'-phosphate
  modified_base 6: mod_base = OTHER; note = 2'-O-methylcytidine-3'-phosphate
  modified_base 7: mod_base = OTHER; note = Adenosine-glycol nucleic acid (GNA)
  modified_base 8: mod_base = OTHER; note = 2'-O-methylguanosine-3'-phosphate
  modified_base 9: mod_base = OTHER; note = 2'-O-methyladenosine-3'-phosphate
  modified_base 10: mod_base = OTHER; note = 2'-O-methylcytidine-3'-phosphate
  modified_base 11: mod_base = OTHER; note = 2'-O-methyladenosine-3'-phosphate
  modified_base 12: mod_base = OTHER; note = 2'-O-methyladenosine-3'-phosphate
  modified_base 13: mod_base = OTHER; note = 2'-O-methylguanosine-3'-phosphate
  modified_base 14: mod_base = OTHER; note = 2'-fluoroadenosine-3'-phosphate
  modified_base 15: mod_base = OTHER; note = 2'-O-methyladenosine-3'-phosphate
  modified_base 16: mod_base = OTHER; note = 2'-fluoroadenosine-3'-phosphate
  modified_base 17: mod_base = OTHER; note = 2'-O-methylguanosine-3'-phosphate
  modified_base 18: mod_base = OTHER; note = 2'-O-methyluridine-3'-phosphate
  modified_base 19: mod_base = OTHER; note = 2'-O-methylguanosine-3'-phosphate
  modified_base 20: mod_base = OTHER; note = 2'-O-methylcytidine-3'-phosphate
  modified_base 21: mod_base = OTHER; note = 2'-O-methylcytidine-3'-phosphorothioate
  modified_base 22: mod_base = OTHER; note = 2'-O-methylcytidine-3'-phosphorothioate
  modified_base 23: mod_base = OTHER; note = 2'-O-methyladenosine-3'-phosphate
  misc_feature 1..4: note = RNA
  misc_feature 5: note = DNA
  misc_feature 6..23: note = RNA
agtctcagacaagaaagtgccca

SEQ ID NO: 7875 - DNA, 23 bp, synthetic construct
  source 1..23: mol_type = other DNA
  modified_base 1: mod_base = OTHER; note = 2'-O-methyladenosine-3'-phosphorothioate
  modified_base 2: mod_base = OTHER; note = 2'-fluoroguanosine-3'-phosphorothioate
  modified_base 3: mod_base = OTHER; note = 2'-O-methyladenosine-3'-phosphate
  modified_base 4: mod_base = OTHER; note = 2'-O-methylguanosine-3'-phosphate
  modified_base 6: mod_base = OTHER; note = 2'-O-methylcytidine-3'-phosphate
  modified_base 7: mod_base = OTHER; note = Thymidine-glycol nucleic acid (GNA) S-Isomer
  modified_base 8: mod_base = OTHER; note = 2'-O-methylcytidine-3'-phosphate
  modified_base 9: mod_base = OTHER; note = 2'-O-methyladenosine-3'-phosphate
  modified_base 10: mod_base = OTHER; note = 2'-O-methylguanosine-3'-phosphate
  modified_base 11: mod_base = OTHER; note = 2'-O-methyladenosine-3'-phosphate
  modified_base 12: mod_base = OTHER; note = 2'-O-methylcytidine-3'-phosphate
  modified_base 13: mod_base = OTHER; note = 2'-O-methyladenosine-3'-phosphate
  modified_base 14: mod_base = OTHER; note = 2'-fluoroadenosine-3'-phosphate
  modified_base 15: mod_base = OTHER; note = 2'-O-methylguanosine-3'-phosphate
  modified_base 16: mod_base = OTHER; note = 2'-fluoroadenosine-3'-phosphate
  modified_base 17: mod_base = OTHER; note = 2'-O-methyladenosine-3'-phosphate
  modified_base 18: mod_base = OTHER; note = 2'-O-methyladenosine-3'-phosphate
  modified_base 19: mod_base = OTHER; note = 2'-O-methylguanosine-3'-phosphate
  modified_base 20: mod_base = OTHER; note = 2'-O-methyluridine-3'-phosphate
  modified_base 21: mod_base = OTHER; note = 2'-O-methylguanosine-3'-phosphorothioate
  modified_base 22: mod_base = OTHER; note = 2'-O-methylcytidine-3'-phosphorothioate
  modified_base 23: mod_base = OTHER; note = 2'-O-methylcytidine-3'-phosphate
  misc_feature 1..4: note = RNA
  misc_feature 5: note = DNA
  misc_feature 6: note = RNA
  misc_feature 7: note = DNA
  misc_feature 8..23: note = RNA
agagtctcagacaagaaagtgcc

SEQ ID NO: 7876 - DNA, 23 bp, synthetic construct
  source 1..23: mol_type = other DNA
  modified_base 1: mod_base = OTHER; note = 2'-O-methyladenosine-3'-phosphorothioate
  modified_base 2: mod_base = OTHER; note = 2'-fluorocytidine-3'-phosphorothioate
  modified_base 3: mod_base = OTHER; note = 2'-O-methyladenosine-3'-phosphate
  modified_base 4: mod_base = OTHER; note = 2'-O-methylguanosine-3'-phosphate
  modified_base 6: mod_base = OTHER; note = 2'-O-methylguanosine-3'-phosphate
  modified_base 7: mod_base = OTHER; note = Thymidine-glycol nucleic acid (GNA) S-Isomer
  modified_base 8: mod_base = OTHER; note = 2'-O-methylcytidine-3'-phosphate
  modified_base 9: mod_base = OTHER; note = 2'-O-methyluridine-3'-phosphate
  modified_base 10: mod_base = OTHER; note = 2'-O-methylcytidine-3'-phosphate
  modified_base 11: mod_base = OTHER; note = 2'-O-methyladenosine-3'-phosphate
  modified_base 12: mod_base = OTHER; note = 2'-O-methylguanosine-3'-phosphate
  modified_base 13: mod_base = OTHER; note = 2'-O-methyladenosine-3'-phosphate
  modified_base 14: mod_base = OTHER; note = 2'-fluorocytidine-3'-phosphate
  modified_base 15: mod_base = OTHER; note = 2'-O-methyladenosine-3'-phosphate
  modified_base 16: mod_base = OTHER; note = 2'-fluoroadenosine-3'-phosphate
  modified_base 17: mod_base = OTHER; note = 2'-O-methylguanosine-3'-phosphate
  modified_base 18: mod_base = OTHER; note = 2'-O-methyladenosine-3'-phosphate
  modified_base 19: mod_base = OTHER; note = 2'-O-methyladenosine-3'-phosphate
  modified_base 20: mod_base = OTHER; note = 2'-O-methyladenosine-3'-phosphate
  modified_base 21: mod_base = OTHER; note = 2'-O-methylguanosine-3'-phosphorothioate
  modified_base 22: mod_base = OTHER; note = 2'-O-methyluridine-3'-phosphorothioate
  modified_base 23: mod_base = OTHER; note = 2'-O-methylguanosine-3'-phosphate
  misc_feature 1..4: note = RNA
  misc_feature 5: note = DNA
  misc_feature 6: note = RNA
  misc_feature 7: note = DNA
  misc_feature 8..23: note = RNA
acagagtctcagacaagaaagtg

SEQ ID NO: 7877 - DNA, 23 bp, synthetic construct
  source 1..23: mol_type = other DNA
  modified_base 1: mod_base = OTHER; note = 2'-O-methyladenosine-3'-phosphorothioate
  modified_base 2: mod_base = OTHER; note = 2'-fluoroguanosine-3'-phosphorothioate
  modified_base 3: mod_base = OTHER; note = 2'-O-methylcytidine-3'-phosphate
  modified_base 4: mod_base = OTHER; note = 2'-O-methylcytidine-3'-phosphate
  modified_base 6: mod_base = OTHER; note = 2'-O-methylguanosine-3'-phosphate
  modified_base 7: mod_base = OTHER; note = Adenosine-glycol nucleic acid (GNA)
  modified_base 8: mod_base = OTHER; note = 2'-O-methylguanosine-3'-phosphate
  modified_base 9: mod_base = OTHER; note = 2'-O-methyluridine-3'-phosphate
  modified_base 10: mod_base = OTHER; note = 2'-O-methylcytidine-3'-phosphate
  modified_base 11: mod_base = OTHER; note = 2'-O-methyluridine-3'-phosphate
  modified_base 12: mod_base = OTHER; note = 2'-O-methylcytidine-3'-phosphate
  modified_base 13: mod_base = OTHER; note = 2'-O-methyladenosine-3'-phosphate
  modified_base 14: mod_base = OTHER; note = 2'-fluoroguanosine-3'-phosphate
  modified_base 15: mod_base = OTHER; note = 2'-O-methyladenosine-3'-phosphate
  modified_base 16: mod_base = OTHER; note = 2'-fluorocytidine-3'-phosphate
  modified_base 17: mod_base = OTHER; note = 2'-O-methyladenosine-3'-phosphate
  modified_base 18: mod_base = OTHER; note = 2'-O-methyladenosine-3'-phosphate
  modified_base 19: mod_base = OTHER; note = 2'-O-methylguanosine-3'-phosphate
  modified_base 20: mod_base = OTHER; note = 2'-O-methyladenosine-3'-phosphate
  modified_base 21: mod_base = OTHER; note = 2'-O-methyladenosine-3'-phosphorothioate
  modified_base 22: mod_base = OTHER; note = 2'-O-methyladenosine-3'-phosphorothioate
  modified_base 23: mod_base = OTHER; note = 2'-O-methylguanosine-3'-phosphate
  misc_feature 1..4: note = RNA
  misc_feature 5: note = DNA
  misc_feature 6..23: note = RNA
agccagagtctcagacaagaaag

SEQ ID NO: 7878 - DNA, 23 bp, synthetic construct
  source 1..23: mol_type = other DNA
  modified_base 1: mod_base = OTHER; note = 2'-O-methyladenosine-3'-phosphorothioate
  modified_base 2: mod_base = OTHER; note = 2'-fluoroadenosine-3'-phosphorothioate
  modified_base 3: mod_base = OTHER; note = 2'-O-methyladenosine-3'-phosphate
  modified_base 4: mod_base = OTHER; note = 2'-O-methylguanosine-3'-phosphate
  modified_base 6: mod_base = OTHER; note = 2'-O-methylcytidine-3'-phosphate
  modified_base 7: mod_base = OTHER; note = Adenosine-glycol nucleic acid (GNA)
  modified_base 8: mod_base = OTHER; note = 2'-O-methylguanosine-3'-phosphate
  modified_base 9: mod_base = OTHER; note = 2'-O-methyladenosine-3'-phosphate
  modified_base 10: mod_base = OTHER; note = 2'-O-methylguanosine-3'-phosphate
  modified_base 11: mod_base = OTHER; note = 2'-O-methyluridine-3'-phosphate
  modified_base 12: mod_base = OTHER; note = 2'-O-methylcytidine-3'-phosphate
  modified_base 13: mod_base = OTHER; note = 2'-O-methyluridine-3'-phosphate
  modified_base 14: mod_base = OTHER; note = 2'-fluorocytidine-3'-phosphate
  modified_base 15: mod_base = OTHER; note = 2'-O-methyladenosine-3'-phosphate
  modified_base 16: mod_base = OTHER; note = 2'-fluoroguanosine-3'-phosphate
  modified_base 17: mod_base = OTHER; note = 2'-O-methyladenosine-3'-phosphate
  modified_base 18: mod_base = OTHER; note = 2'-O-methylcytidine-3'-phosphate
  modified_base 19: mod_base = OTHER; note = 2'-O-methyladenosine-3'-phosphate
  modified_base 20: mod_base = OTHER; note = 2'-O-methyladenosine-3'-phosphate
  modified_base 21: mod_base = OTHER; note = 2'-O-methylguanosine-3'-phosphorothioate
  modified_base 22: mod_base = OTHER; note = 2'-O-methyladenosine-3'-phosphorothioate
  modified_base 23: mod_base = OTHER; note = 2'-O-methyladenosine-3'-phosphate
  misc_feature 1..4: note = RNA
  misc_feature 5: note = DNA
  misc_feature 6..23: note = RNA
aaagccagagtctcagacaagaa

SEQ ID NO: 7879 - DNA, 23 bp, synthetic construct
  source 1..23: mol_type = other DNA
  modified_base 1: mod_base = OTHER; note = 2'-O-methyladenosine-3'-phosphorothioate
  modified_base 2: mod_base = OTHER; note = 2'-fluoroadenosine-3'-phosphorothioate
  modified_base 3: mod_base = OTHER; note = 2'-O-methylcytidine-3'-phosphate
  modified_base 4: mod_base = OTHER; note = 2'-O-methyladenosine-3'-phosphate
  modified_base 6: mod_base = OTHER; note = 2'-O-methylcytidine-3'-phosphate
  modified_base 7: mod_base = OTHER; note = Adenosine-glycol nucleic acid (GNA)
  modified_base 8: mod_base = OTHER; note = 2'-O-methylguanosine-3'-phosphate
  modified_base 9: mod_base = OTHER; note = 2'-O-methylcytidine-3'-phosphate
  modified_base 10: mod_base = OTHER; note = 2'-O-methylcytidine-3'-phosphate
  modified_base 11: mod_base = OTHER; note = 2'-O-methyladenosine-3'-phosphate
  modified_base 12: mod_base = OTHER; note = 2'-O-methyladenosine-3'-phosphate
  modified_base 13: mod_base = OTHER; note = 2'-O-methylcytidine-3'-phosphate
  modified_base 14: mod_base = OTHER; note = 2'-fluorocytidine-3'-phosphate
  modified_base 15: mod_base = OTHER; note = 2'-O-methyluridine-3'-phosphate
  modified_base 16: mod_base = OTHER; note = 2'-fluoroguanosine-3'-phosphate
  modified_base 17: mod_base = OTHER; note = 2'-O-methylguanosine-3'-phosphate
  modified_base 18: mod_base = OTHER; note = 2'-O-methyladenosine-3'-phosphate
  modified_base 19: mod_base = OTHER; note = 2'-O-methyladenosine-3'-phosphate
  modified_base 20: mod_base = OTHER; note = 2'-O-methyluridine-3'-phosphate
  modified_base 21: mod_base = OTHER; note = 2'-O-methyladenosine-3'-phosphorothioate
  modified_base 22: mod_base = OTHER; note = 2'-O-methyladenosine-3'-phosphorothioate
  modified_base 23: mod_base = OTHER; note = 2'-O-methylguanosine-3'-phosphate
  misc_feature 1..4: note = RNA
  misc_feature 5: note = DNA
  misc_feature 6..23: note = RNA
aacatcagccaacctggaataag

SEQ ID NO: 7880 - DNA, 23 bp, synthetic construct
  source 1..23: mol_type = other DNA
  modified_base 1: mod_base = OTHER; note = 2'-O-methyladenosine-3'-phosphorothioate
  modified_base 2: mod_base = OTHER; note = 2'-fluoroadenosine-3'-phosphorothioate
  modified_base 3: mod_base = OTHER; note = 2'-O-methyladenosine-3'-phosphate
  modified_base 4: mod_base = OTHER; note = 2'-O-methylcytidine-3'-phosphate
  modified_base 6: mod_base = OTHER; note = 2'-O-methylcytidine-3'-phosphate
  modified_base 7: mod_base = OTHER; note = Adenosine-glycol nucleic acid (GNA)
  modified_base 8: mod_base = OTHER; note = 2'-O-methyluridine-3'-phosphate
  modified_base 9: mod_base = OTHER; note = 2'-O-methylcytidine-3'-phosphate
  modified_base 10: mod_base = OTHER; note = 2'-O-methyladenosine-3'-phosphate
  modified_base 11: mod_base = OTHER; note = 2'-O-methylguanosine-3'-phosphate
  modified_base 12: mod_base = OTHER; note = 2'-O-methylcytidine-3'-phosphate
  modified_base 13: mod_base = OTHER; note = 2'-O-methylcytidine-3'-phosphate
  modified_base 14: mod_base = OTHER; note = 2'-fluoroadenosine-3'-phosphate
  modified_base 15: mod_base = OTHER; note = 2'-O-methyladenosine-3'-phosphate
  modified_base 16: mod_base = OTHER; note = 2'-fluorocytidine-3'-phosphate
  modified_base 17: mod_base = OTHER; note = 2'-O-methylcytidine-3'-phosphate
  modified_base 18: mod_base = OTHER; note = 2'-O-methyluridine-3'-phosphate
  modified_base 19: mod_base = OTHER; note = 2'-O-methylguanosine-3'-phosphate
  modified_base 20: mod_base = OTHER; note = 2'-O-methylguanosine-3'-phosphate
  modified_base 21: mod_base = OTHER; note = 2'-O-methyladenosine-3'-phosphorothioate
  modified_base 22: mod_base = OTHER; note = 2'-O-methyladenosine-3'-phosphorothioate
  modified_base 23: mod_base = OTHER; note = 2'-O-methyluridine-3'-phosphate
  misc_feature 1..4: note = RNA
  misc_feature 5: note = DNA
  misc_feature 6..23: note = RNA
aaacacatcagccaacctggaat

SEQ ID NO: 7881 - DNA, 23 bp, synthetic construct
  source 1..23: mol_type = other DNA
  modified_base 1: mod_base = OTHER; note = 2'-O-methyladenosine-3'-phosphorothioate
  modified_base 2: mod_base = OTHER; note = 2'-fluoroguanosine-3'-phosphorothioate
  modified_base 3: mod_base = OTHER; note = 2'-O-methyladenosine-3'-phosphate
  modified_base 4: mod_base = OTHER; note = 2'-O-methyluridine-3'-phosphate
  modified_base 6: mod_base = OTHER; note = 2'-O-methylcytidine-3'-phosphate
  modified_base 7: mod_base = OTHER; note = Adenosine-glycol nucleic acid (GNA)
  modified_base 8: mod_base = OTHER; note = 2'-O-methylguanosine-3'-phosphate
  modified_base 9: mod_base = OTHER; note = 2'-O-methylguanosine-3'-phosphate
  modified_base 10: mod_base = OTHER; note = 2'-O-methyluridine-3'-phosphate
  modified_base 11: mod_base = OTHER; note = 2'-O-methyladenosine-3'-phosphate
  modified_base 12: mod_base = OTHER; note = 2'-O-methylguanosine-3'-phosphate
  modified_base 13: mod_base = OTHER; note = 2'-O-methyladenosine-3'-phosphate
  modified_base 14: mod_base = OTHER; note = 2'-fluoroguanosine-3'-phosphate
  modified_base 15: mod_base = OTHER; note = 2'-O-methylguanosine-3'-phosphate
  modified_base 16: mod_base = OTHER; note = 2'-fluoroadenosine-3'-phosphate
  modified_base 17: mod_base = OTHER; note = 2'-O-methylguanosine-3'-phosphate
  modified_base 18: mod_base = OTHER; note = 2'-O-methyladenosine-3'-phosphate
  modified_base 19: mod_base = OTHER; note = 2'-O-methylguanosine-3'-phosphate
  modified_base 20: mod_base = OTHER; note = 2'-O-methyladenosine-3'-phosphate
  modified_base 21: mod_base = OTHER; note = 2'-O-methylguanosine-3'-phosphorothioate
  modified_base 22: mod_base = OTHER; note = 2'-O-methyladenosine-3'-phosphorothioate
  modified_base 23: mod_base = OTHER; note = 2'-O-methylguanosine-3'-phosphate
  misc_feature 1..4: note = RNA
  misc_feature 5: note = DNA
  misc_feature 6..23: note = RNA
agatccaggtagaggagagagag

SEQ ID NO: 7882 - DNA, 23 bp, synthetic construct
  source 1..23: mol_type = other DNA
  modified_base 1: mod_base = OTHER; note = 2'-O-methyladenosine-3'-phosphorothioate
  modified_base 2: mod_base = OTHER; note = 2'-fluoroadenosine-3'-phosphorothioate
  modified_base 3: mod_base = OTHER; note = 2'-O-methylguanosine-3'-phosphate
  modified_base 4: mod_base = OTHER; note = 2'-O-methylguanosine-3'-phosphate
  modified_base 6: mod_base = OTHER; note = 2'-O-methylcytidine-3'-phosphate
  modified_base 7: mod_base = OTHER; note = Thymidine-glycol nucleic acid (GNA) S-Isomer
  modified_base 8: mod_base = OTHER; note = 2'-O-methyluridine-3'-phosphate
  modified_base 9: mod_base = OTHER; note = 2'-O-methyladenosine-3'-phosphate
  modified_base 10: mod_base = OTHER; note = 2'-O-methylguanosine-3'-phosphate
  modified_base 11: mod_base = OTHER; note = 2'-O-methylguanosine-3'-phosphate
  modified_base 12: mod_base = OTHER; note = 2'-O-methylguanosine-3'-phosphate
  modified_base 13: mod_base = OTHER; note = 2'-O-methylcytidine-3'-phosphate
  modified_base 14: mod_base = OTHER; note = 2'-fluoroadenosine-3'-phosphate
  modified_base 15: mod_base = OTHER; note = 2'-O-methylguanosine-3'-phosphate
  modified_base 16: mod_base = OTHER; note = 2'-fluoroguanosine-3'-phosphate
  modified_base 17: mod_base = OTHER; note = 2'-O-methyladenosine-3'-phosphate
  modified_base 18: mod_base = OTHER; note = 2'-O-methyladenosine-3'-phosphate
  modified_base 19: mod_base = OTHER; note = 2'-O-methyladenosine-3'-phosphate
  modified_base 20: mod_base = OTHER; note = 2'-O-methyluridine-3'-phosphate
  modified_base 21: mod_base = OTHER; note = 2'-O-methylcytidine-3'-phosphorothioate
  modified_base 22: mod_base = OTHER; note = 2'-O-methyladenosine-3'-phosphorothioate
  modified_base 23: mod_base = OTHER; note = 2'-O-methyluridine-3'-phosphate
  misc_feature 1..4: note = RNA
  misc_feature 5: note = DNA
  misc_feature 6: note = RNA
  misc_feature 7: note = DNA
  misc_feature 8..23: note = RNA
aaggacttagggcaggaaatcat

SEQ ID NO: 7883 - DNA, 23 bp, synthetic construct
  source 1..23: mol_type = other DNA
  modified_base 1: mod_base = OTHER; note = 2'-O-methyladenosine-3'-phosphorothioate
  modified_base 2: mod_base = OTHER; note = 2'-fluoroadenosine-3'-phosphorothioate
  modified_base 3: mod_base = OTHER; note = 2'-O-methylcytidine-3'-phosphate
  modified_base 4: mod_base = OTHER; note = 2'-O-methyladenosine-3'-phosphate
  modified_base 6: mod_base = OTHER; note = 2'-O-methylguanosine-3'-phosphate
  modified_base 7: mod_base = OTHER; note = Adenosine-glycol nucleic acid (GNA)
  modified_base 8: mod_base = OTHER; note = 2'-O-methylcytidine-3'-phosphate
  modified_base 9: mod_base = OTHER; note = 2'-O-methyluridine-3'-phosphate
  modified_base 10: mod_base = OTHER; note = 2'-O-methyluridine-3'-phosphate
  modified_base 11: mod_base = OTHER; note = 2'-O-methyladenosine-3'-phosphate
  modified_base 12: mod_base = OTHER; note = 2'-O-methylguanosine-3'-phosphate
  modified_base 13: mod_base = OTHER; note = 2'-O-methylguanosine-3'-phosphate
  modified_base 14: mod_base = OTHER; note = 2'-fluoroguanosine-3'-phosphate
  modified_base 15: mod_base = OTHER; note = 2'-O-methylcytidine-3'-phosphate
  modified_base 16: mod_base = OTHER; note = 2'-fluoroadenosine-3'-phosphate
  modified_base 17: mod_base = OTHER; note = 2'-O-methylguanosine-3'-phosphate
  modified_base 18: mod_base = OTHER; note = 2'-O-methylguanosine-3'-phosphate
  modified_base 19: mod_base = OTHER; note = 2'-O-methyladenosine-3'-phosphate
  modified_base 20: mod_base = OTHER; note = 2'-O-methyladenosine-3'-phosphate
  modified_base 21: mod_base = OTHER; note = 2'-O-methyladenosine-3'-phosphorothioate
  modified_base 22: mod_base = OTHER; note = 2'-O-methyluridine-3'-phosphorothioate
  modified_base 23: mod_base = OTHER; note = 2'-O-methylcytidine-3'-phosphate
  misc_feature 1..4: note = RNA
  misc_feature 5: note = DNA
  misc_feature 6..23: note = RNA
aacaggacttagggcaggaaatc

SEQ ID NO: 7884 - DNA, 23 bp, synthetic construct
  source 1..23: mol_type = other DNA
  modified_base 1: mod_base = OTHER; note = 2'-O-methyladenosine-3'-phosphorothioate
  modified_base 2: mod_base = OTHER; note = 2'-fluorocytidine-3'-phosphorothioate
  modified_base 3: mod_base = OTHER; note = 2'-O-methylcytidine-3'-phosphate
  modified_base 4: mod_base = OTHER; note = 2'-O-methyluridine-3'-phosphate
  modified_base 6: mod_base = OTHER; note = 2'-O-methylguanosine-3'-phosphate
  modified_base 7: mod_base = OTHER; note = Thymidine-glycol nucleic acid (GNA) S-Isomer
  modified_base 8: mod_base = OTHER; note = 2'-O-methylcytidine-3'-phosphate
  modified_base 9: mod_base = OTHER; note = 2'-O-methylcytidine-3'-phosphate
  modified_base 10: mod_base = OTHER; note = 2'-O-methylcytidine-3'-phosphate
  modified_base 11: mod_base = OTHER; note = 2'-O-methyluridine-3'-phosphate
  modified_base 12: mod_base = OTHER; note = 2'-O-methylguanosine-3'-phosphate
  modified_base 13: mod_base = OTHER; note = 2'-O-methyladenosine-3'-phosphate
  modified_base 14: mod_base = OTHER; note = 2'-fluorocytidine-3'-phosphate
  modified_base 15: mod_base = OTHER; note = 2'-O-methyladenosine-3'-phosphate
  modified_base 16: mod_base = OTHER; note = 2'-fluorouridine-3'-phosphate
  modified_base 17: mod_base = OTHER; note = 2'-O-methylcytidine-3'-phosphate
  modified_base 18: mod_base = OTHER; note = 2'-O-methyluridine-3'-phosphate
  modified_base 19: mod_base = OTHER; note = 2'-O-methyluridine-3'-phosphate
  modified_base 20: mod_base = OTHER; note = 2'-O-methylcytidine-3'-phosphate
  modified_base 21: mod_base = OTHER; note = 2'-O-methyluridine-3'-phosphorothioate
  modified_base 22: mod_base = OTHER; note = 2'-O-methylcytidine-3'-phosphorothioate
  modified_base 23: mod_base = OTHER; note = 2'-O-methyladenosine-3'-phosphate
  misc_feature 1..4: note = RNA
  misc_feature 5: note = DNA
  misc_feature 6: note = RNA
  misc_feature 7: note = DNA
  misc_feature 8..23: note = RNA
acctagtccctgacatcttctca

SEQ ID NO: 7885 - DNA, 23 bp, synthetic construct
  source 1..23: mol_type = other DNA
  modified_base 1: mod_base = OTHER; note = 2'-O-methyladenosine-3'-phosphorothioate
  modified_base 2: mod_base = OTHER; note = 2'-fluorouridine -3'-phosphorothioate
  modified_base 3: mod_base = OTHER; note = 2'-O-methylcytidine-3'-phosphate
  modified_base 4: mod_base = OTHER; note = 2'-O-methylcytidine-3'-phosphate
  modified_base 6: mod_base = OTHER; note = 2'-O-methyluridine-3'-phosphate
  modified_base 7: mod_base = OTHER; note = Adenosine-glycol nucleic acid (GNA)
  modified_base 8: mod_base = OTHER; note = 2'-O-methylguanosine-3'-phosphate
  modified_base 9: mod_base = OTHER; note = 2'-O-methyluridine-3'-phosphate
  modified_base 10: mod_base = OTHER; note = 2'-O-methylcytidine-3'-phosphate
  modified_base 11: mod_base = OTHER; note = 2'-O-methylcytidine-3'-phosphate
  modified_base 12: mod_base = OTHER; note = 2'-O-methylcytidine-3'-phosphate
  modified_base 13: mod_base = OTHER; note = 2'-O-methyluridine-3'-phosphate
  modified_base 14: mod_base = OTHER; note = 2'-fluoroguanosine-3'-phosphate
  modified_base 15: mod_base = OTHER; note = 2'-O-methyladenosine-3'-phosphate
  modified_base 16: mod_base = OTHER; note = 2'-fluorocytidine-3'-phosphate
  modified_base 17: mod_base = OTHER; note = 2'-O-methyladenosine-3'-phosphate
  modified_base 18: mod_base = OTHER; note = 2'-O-methyluridine-3'-phosphate
  modified_base 19: mod_base = OTHER; note = 2'-O-methylcytidine-3'-phosphate
  modified_base 20: mod_base = OTHER; note = 2'-O-methyluridine-3'-phosphate
  modified_base 21: mod_base = OTHER; note = 2'-O-methyluridine-3'-phosphorothioate
  modified_base 22: mod_base = OTHER; note = 2'-O-methylcytidine-3'-phosphorothioate
  modified_base 23: mod_base = OTHER; note = 2'-O-methyluridine-3'-phosphate
  misc_feature 1..4: note = RNA
  misc_feature 5: note = DNA
  misc_feature 6..23: note = RNA
atccctagtccctgacatcttct

SEQ ID NO: 7886 - DNA, 23 bp, synthetic construct
  source 1..23: mol_type = other DNA
  modified_base 1: mod_base = OTHER; note = 2'-O-methyladenosine-3'-phosphorothioate
  modified_base 2: mod_base = OTHER; note = 2'-fluorocytidine-3'-phosphorothioate
  modified_base 3: mod_base = OTHER; note = 2'-O-methylcytidine-3'-phosphate
  modified_base 4: mod_base = OTHER; note = 2'-O-methyladenosine-3'-phosphate
  modified_base 6: mod_base = OTHER; note = 2'-O-methylcytidine-3'-phosphate
  modified_base 7: mod_base = OTHER; note = Thymidine-glycol nucleic acid (GNA) S-Isomer
  modified_base 8: mod_base = OTHER; note = 2'-O-methyladenosine-3'-phosphate
  modified_base 9: mod_base = OTHER; note = 2'-O-methyluridine-3'-phosphate
  modified_base 10: mod_base = OTHER; note = 2'-O-methylcytidine-3'-phosphate
  modified_base 11: mod_base = OTHER; note = 2'-O-methyluridine-3'-phosphate
  modified_base 12: mod_base = OTHER; note = 2'-O-methylguanosine-3'-phosphate
  modified_base 13: mod_base = OTHER; note = 2'-O-methylcytidine-3'-phosphate
  modified_base 14: mod_base = OTHER; note = 2'-fluorouridine-3'-phosphate
  modified_base 15: mod_base = OTHER; note = 2'-O-methyluridine-3'-phosphate
  modified_base 16: mod_base = OTHER; note = 2'-fluorocytidine-3'-phosphate
  modified_base 17: mod_base = OTHER; note = 2'-O-methylcytidine-3'-phosphate
  modified_base 18: mod_base = OTHER; note = 2'-O-methyluridine-3'-phosphate
  modified_base 19: mod_base = OTHER; note = 2'-O-methylcytidine-3'-phosphate
  modified_base 20: mod_base = OTHER; note = 2'-O-methylcytidine-3'-phosphate
  modified_base 21: mod_base = OTHER; note = 2'-O-methyluridine-3'-phosphorothioate
  modified_base 22: mod_base = OTHER; note = 2'-O-methylcytidine-3'-phosphorothioate
  modified_base 23: mod_base = OTHER; note = 2'-O-methylcytidine-3'-phosphate
  misc_feature 1..4: note = RNA
  misc_feature 5: note = DNA
  misc_feature 6: note = RNA
  misc_feature 7: note = DNA
  misc_feature 8..23: note = RNA
accatctatctgcttcctcctcc

SEQ ID NO: 7887 - DNA, 23 bp, synthetic construct
  source 1..23: mol_type = other DNA
  modified_base 1: mod_base = OTHER; note = 2'-O-methyladenosine-3'-phosphorothioate
  modified_base 2: mod_base = OTHER; note = 2'-fluoroguanosine-3'-phosphorothioate
  modified_base 3: mod_base = OTHER; note = 2'-O-methyladenosine-3'-phosphate
  modified_base 4: mod_base = OTHER; note = 2'-O-methylcytidine-3'-phosphate
  modified_base 6: mod_base = OTHER; note = 2'-O-methyladenosine-3'-phosphate
  modified_base 7: mod_base = OTHER; note = Thymidine-glycol nucleic acid (GNA) S-Isomer
  modified_base 8: mod_base = OTHER; note = 2'-O-methylcytidine-3'-phosphate
  modified_base 9: mod_base = OTHER; note = 2'-O-methyluridine-3'-phosphate
  modified_base 10: mod_base = OTHER; note = 2'-O-methyladenosine-3'-phosphate
  modified_base 11: mod_base = OTHER; note = 2'-O-methyluridine-3'-phosphate
  modified_base 12: mod_base = OTHER; note = 2'-O-methylcytidine-3'-phosphate
  modified_base 13: mod_base = OTHER; note = 2'-O-methyluridine-3'-phosphate
  modified_base 14: mod_base = OTHER; note = 2'-fluoroguanosine-3'-phosphate
  modified_base 15: mod_base = OTHER; note = 2'-O-methylcytidine-3'-phosphate
  modified_base 16: mod_base = OTHER; note = 2'-fluorouridine-3'-phosphate
  modified_base 17: mod_base = OTHER; note = 2'-O-methyluridine-3'-phosphate
  modified_base 18: mod_base = OTHER; note = 2'-O-methylcytidine-3'-phosphate
  modified_base 19: mod_base = OTHER; note = 2'-O-methylcytidine-3'-phosphate
  modified_base 20: mod_base = OTHER; note = 2'-O-methyluridine-3'-phosphate
  modified_base 21: mod_base = OTHER; note = 2'-O-methylcytidine-3'-phosphorothioate
  modified_base 22: mod_base = OTHER; note = 2'-O-methylcytidine-3'-phosphorothioate
  modified_base 23: mod_base = OTHER; note = 2'-O-methyluridine-3'-phosphate
  misc_feature 1..4: note = RNA
  misc_feature 5: note = DNA
  misc_feature 6: note = RNA
  misc_feature 7: note = DNA
  misc_feature 8..23: note = RNA
agaccatctatctgcttcctcct

SEQ ID NO: 7888 - DNA, 23 bp, synthetic construct
  source 1..23: mol_type = other DNA
  modified_base 1: mod_base = OTHER; note = 2'-O-methyladenosine-3'-phosphorothioate
  modified_base 2: mod_base = OTHER; note = 2'-fluoroguanosine-3'-phosphorothioate
  modified_base 3: mod_base = OTHER; note = 2'-O-methylguanosine-3'-phosphate
  modified_base 4: mod_base = OTHER; note = 2'-O-methyladenosine-3'-phosphate
  modified_base 6: mod_base = OTHER; note = 2'-O-methylcytidine-3'-phosphate
  modified_base 7: mod_base = OTHER; note = Adenosine-glycol nucleic acid (GNA)
  modified_base 8: mod_base = OTHER; note = 2'-O-methyluridine-3'-phosphate
  modified_base 9: mod_base = OTHER; note = 2'-O-methylcytidine-3'-phosphate
  modified_base 10: mod_base = OTHER; note = 2'-O-methyluridine-3'-phosphate
  modified_base 11: mod_base = OTHER; note = 2'-O-methyladenosine-3'-phosphate
  modified_base 12: mod_base = OTHER; note = 2'-O-methyluridine-3'-phosphate
  modified_base 13: mod_base = OTHER; note = 2'-O-methylcytidine-3'-phosphate
  modified_base 14: mod_base = OTHER; note = 2'-fluorouridine-3'-phosphate
  modified_base 15: mod_base = OTHER; note = 2'-O-methylguanosine-3'-phosphate
  modified_base 16: mod_base = OTHER; note = 2'-fluorocytidine-3'-phosphate
  modified_base 17: mod_base = OTHER; note = 2'-O-methyluridine-3'-phosphate
  modified_base 18: mod_base = OTHER; note = 2'-O-methyluridine-3'-phosphate
  modified_base 19: mod_base = OTHER; note = 2'-O-methylcytidine-3'-phosphate
  modified_base 20: mod_base = OTHER; note = 2'-O-methylcytidine-3'-phosphate
  modified_base 21: mod_base = OTHER; note = 2'-O-methyluridine-3'-phosphorothioate
  modified_base 22: mod_base = OTHER; note = 2'-O-methylcytidine-3'-phosphorothioate
  modified_base 23: mod_base = OTHER; note = 2'-O-methylcytidine-3'-phosphate
  misc_feature 1..4: note = RNA
  misc_feature 5: note = DNA
  misc_feature 6..23: note = RNA
aggaccatctatctgcttcctcc

SEQ ID NO: 7889 - DNA, 23 bp, synthetic construct
  source 1..23: mol_type = other DNA
  modified_base 1: mod_base = OTHER; note = 2'-O-methyladenosine-3'-phosphorothioate
  modified_base 2: mod_base = OTHER; note = 2'-fluoroguanosine-3'-phosphorothioate
  modified_base 3: mod_base = OTHER; note = 2'-O-methylcytidine-3'-phosphate
  modified_base 4: mod_base = OTHER; note = 2'-O-methyluridine-3'-phosphate
  modified_base 6: mod_base = OTHER; note = 2'-O-methylguanosine-3'-phosphate
  modified_base 7: mod_base = OTHER; note = Adenosine-glycol nucleic acid (GNA)
  modified_base 8: mod_base = OTHER; note = 2'-O-methylcytidine-3'-phosphate
  modified_base 9: mod_base = OTHER; note = 2'-O-methylcytidine-3'-phosphate
  modified_base 10: mod_base = OTHER; note = 2'-O-methyladenosine-3'-phosphate
  modified_base 11: mod_base = OTHER; note = 2'-O-methyluridine-3'-phosphate
  modified_base 12: mod_base = OTHER; note = 2'-O-methylcytidine-3'-phosphate
  modified_base 13: mod_base = OTHER; note = 2'-O-methyluridine-3'-phosphate
  modified_base 14: mod_base = OTHER; note = 2'-fluoroadenosine-3'-phosphate
  modified_base 15: mod_base = OTHER; note = 2'-O-methyluridine-3'-phosphate
  modified_base 16: mod_base = OTHER; note = 2'-fluorocytidine-3'-phosphate
  modified_base 17: mod_base = OTHER; note = 2'-O-methyluridine-3'-phosphate
  modified_base 18: mod_base = OTHER; note = 2'-O-methylguanosine-3'-phosphate
  modified_base 19: mod_base = OTHER; note = 2'-O-methylcytidine-3'-phosphate
  modified_base 20: mod_base = OTHER; note = 2'-O-methyluridine-3'-phosphate
  modified_base 21: mod_base = OTHER; note = 2'-O-methyluridine-3'-phosphorothioate
  modified_base 22: mod_base = OTHER; note = 2'-O-methylcytidine-3'-phosphorothioate
  modified_base 23: mod_base = OTHER; note = 2'-O-methylcytidine-3'-phosphate
  misc_feature 1..4: note = RNA
  misc_feature 5: note = DNA
  misc_feature 6..23: note = RNA
agctggaccatctatctgcttcc

SEQ ID NO: 7890 - DNA, 23 bp, synthetic construct
  source 1..23: mol_type = other DNA
  modified_base 1: mod_base = OTHER; note = 2'-O-methyladenosine-3'-phosphorothioate
  modified_base 2: mod_base = OTHER; note = 2'-fluorocytidine-3'-phosphorothioate
  modified_base 3: mod_base = OTHER; note = 2'-O-methylcytidine-3'-phosphate
  modified_base 4: mod_base = OTHER; note = 2'-O-methyluridine-3'-phosphate
  modified_base 6: mod_base = OTHER; note = 2'-O-methylcytidine-3'-phosphate
  modified_base 7: mod_base = OTHER; note = Thymidine-glycol nucleic acid (GNA) S-Isomer
  modified_base 8: mod_base = OTHER; note = 2'-O-methylguanosine-3'-phosphate
  modified_base 9: mod_base = OTHER; note = 2'-O-methylguanosine-3'-phosphate
  modified_base 10: mod_base = OTHER; note = 2'-O-methyladenosine-3'-phosphate
  modified_base 11: mod_base = OTHER; note = 2'-O-methylcytidine-3'-phosphate
  modified_base 12: mod_base = OTHER; note = 2'-O-methylcytidine-3'-phosphate
  modified_base 13: mod_base = OTHER; note = 2'-O-methyladenosine-3'-phosphate
  modified_base 14: mod_base = OTHER; note = 2'-fluorouridine-3'-phosphate
  modified_base 15: mod_base = OTHER; note = 2'-O-methylcytidine-3'-phosphate
  modified_base 16: mod_base = OTHER; note = 2'-fluorouridine-3'-phosphate
  modified_base 17: mod_base = OTHER; note = 2'-O-methyladenosine-3'-phosphate
  modified_base 18: mod_base = OTHER; note = 2'-O-methyluridine-3'-phosphate
  modified_base 19: mod_base = OTHER; note = 2'-O-methylcytidine-3'-phosphate
  modified_base 20: mod_base = OTHER; note = 2'-O-methyluridine-3'-phosphate
  modified_base 21: mod_base = OTHER; note = 2'-O-methylguanosine-3'-phosphorothioate
  modified_base 22: mod_base = OTHER; note = 2'-O-methylcytidine-3'-phosphorothioate
  modified_base 23: mod_base = OTHER; note = 2'-O-methyluridine-3'-phosphate
  misc_feature 1..4: note = RNA
  misc_feature 5: note = DNA
  misc_feature 6: note = RNA
  misc_feature 7: note = DNA
  misc_feature 8..23: note = RNA
acctgctggaccatctatctgct

SEQ ID NO: 7891 - DNA, 23 bp, synthetic construct
  source 1..23: mol_type = other DNA
  modified_base 1: mod_base = OTHER; note = 2'-O-methyladenosine-3'-phosphorothioate
  modified_base 2: mod_base = OTHER; note = 2'-fluoroadenosine-3'-phosphorothioate
  modified_base 3: mod_base = OTHER; note = 2'-O-methyladenosine-3'-phosphate
  modified_base 4: mod_base = OTHER; note = 2'-O-methylguanosine-3'-phosphate
  modified_base 6: mod_base = OTHER; note = 2'-O-methylcytidine-3'-phosphate
  modified_base 7: mod_base = OTHER; note = Thymidine-glycol nucleic acid (GNA) S-Isomer
  modified_base 8: mod_base = OTHER; note = 2'-O-methylguanosine-3'-phosphate
  modified_base 9: mod_base = OTHER; note = 2'-O-methylcytidine-3'-phosphate
  modified_base 10: mod_base = OTHER; note = 2'-O-methyluridine-3'-phosphate
  modified_base 11: mod_base = OTHER; note = 2'-O-methylguanosine-3'-phosphate
  modified_base 12: mod_base = OTHER; note = 2'-O-methylguanosine-3'-phosphate
  modified_base 13: mod_base = OTHER; note = 2'-O-methyladenosine-3'-phosphate
  modified_base 14: mod_base = OTHER; note = 2'-fluorocytidine-3'-phosphate
  modified_base 15: mod_base = OTHER; note = 2'-O-methylcytidine-3'-phosphate
  modified_base 16: mod_base = OTHER; note = 2'-fluoroadenosine-3'-phosphate
  modified_base 17: mod_base = OTHER; note = 2'-O-methyluridine-3'-phosphate
  modified_base 18: mod_base = OTHER; note = 2'-O-methylcytidine-3'-phosphate
  modified_base 19: mod_base = OTHER; note = 2'-O-methyluridine-3'-phosphate
  modified_base 20: mod_base = OTHER; note = 2'-O-methyladenosine-3'-phosphate
  modified_base 21: mod_base = OTHER; note = 2'-O-methyluridine-3'-phosphorothioate
  modified_base 22: mod_base = OTHER; note = 2'-O-methylcytidine-3'-phosphorothioate
  modified_base 23: mod_base = OTHER; note = 2'-O-methyluridine-3'-phosphate
  misc_feature 1..4: note = RNA
  misc_feature 5: note = DNA
  misc_feature 6: note = RNA
  misc_feature 7: note = DNA
  misc_feature 8..23: note = RNA
aaagcctgctggaccatctatct

SEQ ID NO: 7892 - DNA, 23 bp, synthetic construct
  source 1..23: mol_type = other DNA
  modified_base 1: mod_base = OTHER; note = 2'-O-methyladenosine-3'-phosphorothioate
  modified_base 2: mod_base = OTHER; note = 2'-fluorocytidine-3'-phosphorothioate
  modified_base 3: mod_base = OTHER; note = 2'-O-methyluridine-3'-phosphate
  modified_base 4: mod_base = OTHER; note = 2'-O-methyluridine-3'-phosphate
  modified_base 6: mod_base = OTHER; note = 2'-O-methyladenosine-3'-phosphate
  modified_base 7: mod_base = OTHER; note = Adenosine-glycol nucleic acid (GNA)
  modified_base 8: mod_base = OTHER; note = 2'-O-methylguanosine-3'-phosphate
  modified_base 9: mod_base = OTHER; note = 2'-O-methylcytidine-3'-phosphate
  modified_base 10: mod_base = OTHER; note = 2'-O-methylcytidine-3'-phosphate
  modified_base 11: mod_base = OTHER; note = 2'-O-methyluridine-3'-phosphate
  modified_base 12: mod_base = OTHER; note = 2'-O-methylguanosine-3'-phosphate
  modified_base 13: mod_base = OTHER; note = 2'-O-methylcytidine-3'-phosphate
  modified_base 14: mod_base = OTHER; note = 2'-fluorouridine-3'-phosphate
  modified_base 15: mod_base = OTHER; note = 2'-O-methylguanosine-3'-phosphate
  modified_base 16: mod_base = OTHER; note = 2'-fluoroguanosine-3'-phosphate
  modified_base 17: mod_base = OTHER; note = 2'-O-methyladenosine-3'-phosphate
  modified_base 18: mod_base = OTHER; note = 2'-O-methylcytidine-3'-phosphate
  modified_base 19: mod_base = OTHER; note = 2'-O-methylcytidine-3'-phosphate
  modified_base 20: mod_base = OTHER; note = 2'-O-methyladenosine-3'-phosphate
  modified_base 21: mod_base = OTHER; note = 2'-O-methyluridine-3'-phosphorothioate
  modified_base 22: mod_base = OTHER; note = 2'-O-methylcytidine-3'-phosphorothioate
  modified_base 23: mod_base = OTHER; note = 2'-O-methyluridine-3'-phosphate
  misc_feature 1..4: note = RNA
  misc_feature 5: note = DNA
  misc_feature 6..23: note = RNA
acttcaagcctgctggaccatct

SEQ ID NO: 7893 - DNA, 23 bp, synthetic construct
  source 1..23: mol_type = other DNA
  modified_base 1: mod_base = OTHER; note = 2'-O-methyladenosine-3'-phosphorothioate
  modified_base 2: mod_base = OTHER; note = 2'-fluoroguanosine-3'-phosphorothioate
  modified_base 3: mod_base = OTHER; note = 2'-O-methylcytidine-3'-phosphate
  modified_base 4: mod_base = OTHER; note = 2'-O-methyluridine-3'-phosphate
  modified_base 6: mod_base = OTHER; note = 2'-O-methylcytidine-3'-phosphate
  modified_base 7: mod_base = OTHER; note = Adenosine-glycol nucleic acid (GNA)
  modified_base 8: mod_base = OTHER; note = 2'-O-methyladenosine-3'-phosphate
  modified_base 9: mod_base = OTHER; note = 2'-O-methylguanosine-3'-phosphate
  modified_base 10: mod_base = OTHER; note = 2'-O-methylcytidine-3'-phosphate
  modified_base 11: mod_base = OTHER; note = 2'-O-methylcytidine-3'-phosphate
  modified_base 12: mod_base = OTHER; note = 2'-O-methyluridine-3'-phosphate
  modified_base 13: mod_base = OTHER; note = 2'-O-methylguanosine-3'-phosphate
  modified_base 14: mod_base = OTHER; note = 2'-fluorocytidine-3'-phosphate
  modified_base 15: mod_base = OTHER; note = 2'-O-methyluridine-3'-phosphate
  modified_base 16: mod_base = OTHER; note = 2'-fluoroguanosine-3'-phosphate
  modified_base 17: mod_base = OTHER; note = 2'-O-methylguanosine-3'-phosphate
  modified_base 18: mod_base = OTHER; note = 2'-O-methyladenosine-3'-phosphate
  modified_base 19: mod_base = OTHER; note = 2'-O-methylcytidine-3'-phosphate
  modified_base 20: mod_base = OTHER; note = 2'-O-methylcytidine-3'-phosphate
  modified_base 21: mod_base = OTHER; note = 2'-O-methyladenosine-3'-phosphorothioate
  modified_base 22: mod_base = OTHER; note = 2'-O-methyluridine-3'-phosphorothioate
  modified_base 23: mod_base = OTHER; note = 2'-O-methylcytidine-3'-phosphate
  misc_feature 1..4: note = RNA
  misc_feature 5: note = DNA
  misc_feature 6..23: note = RNA
agcttcaagcctgctggaccatc

SEQ ID NO: 7894 - DNA, 23 bp, synthetic construct
  source 1..23: mol_type = other DNA
  modified_base 1: mod_base = OTHER; note = 2'-O-methyladenosine-3'-phosphorothioate
  modified_base 2: mod_base = OTHER; note = 2'-fluorocytidine-3'-phosphorothioate
  modified_base 3: mod_base = OTHER; note = 2'-O-methyluridine-3'-phosphate
  modified_base 4: mod_base = OTHER; note = 2'-O-methylguanosine-3'-phosphate
  modified_base 6: mod_base = OTHER; note = 2'-O-methyluridine-3'-phosphate
  modified_base 7: mod_base = OTHER; note = Thymidine-glycol nucleic acid (GNA) S-Isomer
  modified_base 8: mod_base = OTHER; note = 2'-O-methylcytidine-3'-phosphate
  modified_base 9: mod_base = OTHER; note = 2'-O-methyladenosine-3'-phosphate
  modified_base 10: mod_base = OTHER; note = 2'-O-methyladenosine-3'-phosphate
  modified_base 11: mod_base = OTHER; note = 2'-O-methylguanosine-3'-phosphate
  modified_base 12: mod_base = OTHER; note = 2'-O-methylcytidine-3'-phosphate
  modified_base 13: mod_base = OTHER; note = 2'-O-methylcytidine-3'-phosphate
  modified_base 14: mod_base = OTHER; note = 2'-fluorouridine-3'-phosphate
  modified_base 15: mod_base = OTHER; note = 2'-O-methylguanosine-3'-phosphate
  modified_base 16: mod_base = OTHER; note = 2'-fluorocytidine-3'-phosphate
  modified_base 17: mod_base = OTHER; note = 2'-O-methyluridine-3'-phosphate
  modified_base 18: mod_base = OTHER; note = 2'-O-methylguanosine-3'-phosphate
  modified_base 19: mod_base = OTHER; note = 2'-O-methylguanosine-3'-phosphate
  modified_base 20: mod_base = OTHER; note = 2'-O-methyladenosine-3'-phosphate
  modified_base 21: mod_base = OTHER; note = 2'-O-methylcytidine-3'-phosphorothioate
  modified_base 22: mod_base = OTHER; note = 2'-O-methylcytidine-3'-phosphorothioate
  modified_base 23: mod_base = OTHER; note = 2'-O-methyladenosine-3'-phosphate
  misc_feature 1..4: note = RNA
  misc_feature 5: note = DNA
  misc_feature 6: note = RNA
  misc_feature 7: note = DNA
  misc_feature 8..23: note = RNA
actgcttcaagcctgctggacca

SEQ ID NO: 7895 - DNA, 23 bp, synthetic construct
  source 1..23: mol_type = other DNA
  modified_base 1: mod_base = OTHER; note = 2'-O-methyladenosine-3'-phosphorothioate
  modified_base 2: mod_base = OTHER; note = 2'-fluorouridine -3'-phosphorothioate
  modified_base 3: mod_base = OTHER; note = 2'-O-methylguanosine-3'-phosphate
  modified_base 4: mod_base = OTHER; note = 2'-O-methylcytidine-3'-phosphate
  modified_base 6: mod_base = OTHER; note = 2'-O-methylcytidine-3'-phosphate
  modified_base 7: mod_base = OTHER; note = Adenosine-glycol nucleic acid (GNA)
  modified_base 8: mod_base = OTHER; note = 2'-O-methyluridine-3'-phosphate
  modified_base 9: mod_base = OTHER; note = 2'-O-methylcytidine-3'-phosphate
  modified_base 10: mod_base = OTHER; note = 2'-O-methyluridine-3'-phosphate
  modified_base 11: mod_base = OTHER; note = 2'-O-methylcytidine-3'-phosphate
  modified_base 12: mod_base = OTHER; note = 2'-O-methylcytidine-3'-phosphate
  modified_base 13: mod_base = OTHER; note = 2'-O-methylcytidine-3'-phosphate
  modified_base 14: mod_base = OTHER; note = 2'-fluorouridine-3'-phosphate
  modified_base 15: mod_base = OTHER; note = 2'-O-methylcytidine-3'-phosphate
  modified_base 16: mod_base = OTHER; note = 2'-fluorouridine-3'-phosphate
  modified_base 17: mod_base = OTHER; note = 2'-O-methyluridine-3'-phosphate
  modified_base 18: mod_base = OTHER; note = 2'-O-methylguanosine-3'-phosphate
  modified_base 19: mod_base = OTHER; note = 2'-O-methyladenosine-3'-phosphate
  modified_base 20: mod_base = OTHER; note = 2'-O-methylcytidine-3'-phosphate
  modified_base 21: mod_base = OTHER; note = 2'-O-methylcytidine-3'-phosphorothioate
  modified_base 22: mod_base = OTHER; note = 2'-O-methyluridine-3'-phosphorothioate
  modified_base 23: mod_base = OTHER; note = 2'-O-methyluridine-3'-phosphate
  misc_feature 1..4: note = RNA
  misc_feature 5: note = DNA
  misc_feature 6..23: note = RNA
atgcccatctccctcttgacctt

SEQ ID NO: 7896 - DNA, 23 bp, synthetic construct
  source 1..23: mol_type = other DNA
  modified_base 1: mod_base = OTHER; note = 2'-O-methyladenosine-3'-phosphorothioate
  modified_base 2: mod_base = OTHER; note = 2'-fluorouridine -3'-phosphorothioate
  modified_base 3: mod_base = OTHER; note = 2'-O-methyladenosine-3'-phosphate
  modified_base 4: mod_base = OTHER; note = 2'-O-methyladenosine-3'-phosphate
  modified_base 6: mod_base = OTHER; note = 2'-O-methylcytidine-3'-phosphate
  modified_base 7: mod_base = OTHER; note = Adenosine-glycol nucleic acid (GNA)
  modified_base 8: mod_base = OTHER; note = 2'-O-methyluridine-3'-phosphate
  modified_base 9: mod_base = OTHER; note = 2'-O-methylcytidine-3'-phosphate
  modified_base 10: mod_base = OTHER; note = 2'-O-methylcytidine-3'-phosphate
  modified_base 11: mod_base = OTHER; note = 2'-O-methyluridine-3'-phosphate
  modified_base 12: mod_base = OTHER; note = 2'-O-methylcytidine-3'-phosphate
  modified_base 13: mod_base = OTHER; note = 2'-O-methylcytidine-3'-phosphate
  modified_base 14: mod_base = OTHER; note = 2'-fluorocytidine-3'-phosphate
  modified_base 15: mod_base = OTHER; note = 2'-O-methyluridine-3'-phosphate
  modified_base 16: mod_base = OTHER; note = 2'-fluorocytidine-3'-phosphate
  modified_base 17: mod_base = OTHER; note = 2'-O-methyladenosine-3'-phosphate
  modified_base 18: mod_base = OTHER; note = 2'-O-methylguanosine-3'-phosphate
  modified_base 19: mod_base = OTHER; note = 2'-O-methylcytidine-3'-phosphate
  modified_base 20: mod_base = OTHER; note = 2'-O-methylguanosine-3'-phosphate
  modified_base 21: mod_base = OTHER; note = 2'-O-methylcytidine-3'-phosphorothioate
  modified_base 22: mod_base = OTHER; note = 2'-O-methylcytidine-3'-phosphorothioate
  modified_base 23: mod_base = OTHER; note = 2'-O-methyluridine-3'-phosphate
  misc_feature 1..4: note = RNA
  misc_feature 5: note = DNA
  misc_feature 6..23: note = RNA
ataagcatcctccctcagcgcct

SEQ ID NO: 7897 - DNA, 23 bp, synthetic construct
  source 1..23: mol_type = other DNA
  modified_base 1: mod_base = OTHER; note = 2'-O-methyladenosine-3'-phosphorothioate
  modified_base 2: mod_base = OTHER; note = 2'-fluoroguanosine-3'-phosphorothioate
  modified_base 3: mod_base = OTHER; note = 2'-O-methyladenosine-3'-phosphate
  modified_base 4: mod_base = OTHER; note = 2'-O-methyladenosine-3'-phosphate
  modified_base 6: mod_base = OTHER; note = 2'-O-methyluridine-3'-phosphate
  modified_base 7: mod_base = OTHER; note = Thymidine-glycol nucleic acid (GNA) S-Isomer
  modified_base 8: mod_base = OTHER; note = 2'-O-methylcytidine-3'-phosphate
  modified_base 9: mod_base = OTHER; note = 2'-O-methyluridine-3'-phosphate
  modified_base 10: mod_base = OTHER; note = 2'-O-methyluridine-3'-phosphate
  modified_base 11: mod_base = OTHER; note = 2'-O-methyladenosine-3'-phosphate
  modified_base 12: mod_base = OTHER; note = 2'-O-methylguanosine-3'-phosphate
  modified_base 13: mod_base = OTHER; note = 2'-O-methylguanosine-3'-phosphate
  modified_base 14: mod_base = OTHER; note = 2'-fluorocytidine-3'-phosphate
  modified_base 15: mod_base = OTHER; note = 2'-O-methyluridine-3'-phosphate
  modified_base 16: mod_base = OTHER; note = 2'-fluorouridine-3'-phosphate
  modified_base 17: mod_base = OTHER; note = 2'-O-methyladenosine-3'-phosphate
  modified_base 18: mod_base = OTHER; note = 2'-O-methylguanosine-3'-phosphate
  modified_base 19: mod_base = OTHER; note = 2'-O-methyluridine-3'-phosphate
  modified_base 20: mod_base = OTHER; note = 2'-O-methylguanosine-3'-phosphate
  modified_base 21: mod_base = OTHER; note = 2'-O-methylcytidine-3'-phosphorothioate
  modified_base 22: mod_base = OTHER; note = 2'-O-methylcytidine-3'-phosphorothioate
  modified_base 23: mod_base = OTHER; note = 2'-O-methyluridine-3'-phosphate
  misc_feature 1..4: note = RNA
  misc_feature 5: note = DNA
  misc_feature 6: note = RNA
  misc_feature 7: note = DNA
  misc_feature 8..23: note = RNA
agaacttcttaggcttagtgcct

SEQ ID NO: 7898 - DNA, 23 bp, synthetic construct
  source 1..23: mol_type = other DNA
  modified_base 1: mod_base = OTHER; note = 2'-O-methyladenosine-3'-phosphorothioate
  modified_base 2: mod_base = OTHER; note = 2'-fluoroguanosine-3'-phosphorothioate
  modified_base 3: mod_base = OTHER; note = 2'-O-methylguanosine-3'-phosphate
  modified_base 4: mod_base = OTHER; note = 2'-O-methyladenosine-3'-phosphate
  modified_base 6: mod_base = OTHER; note = 2'-O-methylcytidine-3'-phosphate
  modified_base 7: mod_base = OTHER; note = Thymidine-glycol nucleic acid (GNA) S-Isomer
  modified_base 8: mod_base = OTHER; note = 2'-O-methyluridine-3'-phosphate
  modified_base 9: mod_base = OTHER; note = 2'-O-methylcytidine-3'-phosphate
  modified_base 10: mod_base = OTHER; note = 2'-O-methyluridine-3'-phosphate
  modified_base 11: mod_base = OTHER; note = 2'-O-methyluridine-3'-phosphate
  modified_base 12: mod_base = OTHER; note = 2'-O-methyladenosine-3'-phosphate
  modified_base 13: mod_base = OTHER; note = 2'-O-methylguanosine-3'-phosphate
  modified_base 14: mod_base = OTHER; note = 2'-fluoroguanosine-3'-phosphate
  modified_base 15: mod_base = OTHER; note = 2'-O-methylcytidine-3'-phosphate
  modified_base 16: mod_base = OTHER; note = 2'-fluorouridine-3'-phosphate
  modified_base 17: mod_base = OTHER; note = 2'-O-methyluridine-3'-phosphate
  modified_base 18: mod_base = OTHER; note = 2'-O-methyladenosine-3'-phosphate
  modified_base 19: mod_base = OTHER; note = 2'-O-methylguanosine-3'-phosphate
  modified_base 20: mod_base = OTHER; note = 2'-O-methyluridine-3'-phosphate
  modified_base 21: mod_base = OTHER; note = 2'-O-methylguanosine-3'-phosphorothioate
  modified_base 22: mod_base = OTHER; note = 2'-O-methylcytidine-3'-phosphorothioate
  modified_base 23: mod_base = OTHER; note = 2'-O-methylcytidine-3'-phosphate
  misc_feature 1..4: note = RNA
  misc_feature 5: note = DNA
  misc_feature 6: note = RNA
  misc_feature 7: note = DNA
  misc_feature 8..23: note = RNA
aggaacttcttaggcttagtgcc

SEQ ID NO: 7899 - DNA, 23 bp, synthetic construct
  source 1..23: mol_type = other DNA
  modified_base 1: mod_base = OTHER; note = 2'-O-methyladenosine-3'-phosphorothioate
  modified_base 2: mod_base = OTHER; note = 2'-fluorouridine -3'-phosphorothioate
  modified_base 3: mod_base = OTHER; note = 2'-O-methyluridine-3'-phosphate
  modified_base 4: mod_base = OTHER; note = 2'-O-methylguanosine-3'-phosphate
  modified_base 6: mod_base = OTHER; note = 2'-O-methylcytidine-3'-phosphate
  modified_base 7: mod_base = OTHER; note = Thymidine-glycol nucleic acid (GNA) S-Isomer
  modified_base 8: mod_base = OTHER; note = 2'-O-methylcytidine-3'-phosphate
  modified_base 9: mod_base = OTHER; note = 2'-O-methylcytidine-3'-phosphate
  modified_base 10: mod_base = OTHER; note = 2'-O-methylcytidine-3'-phosphate
  modified_base 11: mod_base = OTHER; note = 2'-O-methyladenosine-3'-phosphate
  modified_base 12: mod_base = OTHER; note = 2'-O-methylguanosine-3'-phosphate
  modified_base 13: mod_base = OTHER; note = 2'-O-methyluridine-3'-phosphate
  modified_base 14: mod_base = OTHER; note = 2'-fluoroguanosine-3'-phosphate
  modified_base 15: mod_base = OTHER; note = 2'-O-methylguanosine-3'-phosphate
  modified_base 16: mod_base = OTHER; note = 2'-fluoroguanosine-3'-phosphate
  modified_base 17: mod_base = OTHER; note = 2'-O-methyluridine-3'-phosphate
  modified_base 18: mod_base = OTHER; note = 2'-O-methylcytidine-3'-phosphate
  modified_base 19: mod_base = OTHER; note = 2'-O-methylcytidine-3'-phosphate
  modified_base 20: mod_base = OTHER; note = 2'-O-methyluridine-3'-phosphate
  modified_base 21: mod_base = OTHER; note = 2'-O-methylguanosine-3'-phosphorothioate
  modified_base 22: mod_base = OTHER; note = 2'-O-methyluridine-3'-phosphorothioate
  modified_base 23: mod_base = OTHER; note = 2'-O-methylcytidine-3'-phosphate
  misc_feature 1..4: note = RNA
  misc_feature 5: note = DNA
  misc_feature 6: note = RNA
  misc_feature 7: note = DNA
  misc_feature 8..23: note = RNA
attgtctcccagtgggtcctgtc

SEQ ID NO: 7900 - DNA, 23 bp, synthetic construct
  source 1..23: mol_type = other DNA
  modified_base 1: mod_base = OTHER; note = 2'-O-methyladenosine-3'-phosphorothioate
  modified_base 2: mod_base = OTHER; note = 2'-fluoroguanosine-3'-phosphorothioate
  modified_base 3: mod_base = OTHER; note = 2'-O-methylcytidine-3'-phosphate
  modified_base 4: mod_base = OTHER; note = 2'-O-methyluridine-3'-phosphate
  modified_base 6: mod_base = OTHER; note = 2'-O-methylguanosine-3'-phosphate
  modified_base 7: mod_base = OTHER; note = Thymidine-glycol nucleic acid (GNA) S-Isomer
  modified_base 8: mod_base = OTHER; note = 2'-O-methylcytidine-3'-phosphate
  modified_base 9: mod_base = OTHER; note = 2'-O-methyluridine-3'-phosphate
  modified_base 10: mod_base = OTHER; note = 2'-O-methylcytidine-3'-phosphate
  modified_base 11: mod_base = OTHER; note = 2'-O-methylcytidine-3'-phosphate
  modified_base 12: mod_base = OTHER; note = 2'-O-methylcytidine-3'-phosphate
  modified_base 13: mod_base = OTHER; note = 2'-O-methyladenosine-3'-phosphate
  modified_base 14: mod_base = OTHER; note = 2'-fluoroguanosine-3'-phosphate
  modified_base 15: mod_base = OTHER; note = 2'-O-methyluridine-3'-phosphate
  modified_base 16: mod_base = OTHER; note = 2'-fluoroguanosine-3'-phosphate
  modified_base 17: mod_base = OTHER; note = 2'-O-methylguanosine-3'-phosphate
  modified_base 18: mod_base = OTHER; note = 2'-O-methylguanosine-3'-phosphate
  modified_base 19: mod_base = OTHER; note = 2'-O-methyluridine-3'-phosphate
  modified_base 20: mod_base = OTHER; note = 2'-O-methylcytidine-3'-phosphate
  modified_base 21: mod_base = OTHER; note = 2'-O-methylcytidine-3'-phosphorothioate
  modified_base 22: mod_base = OTHER; note = 2'-O-methyluridine-3'-phosphorothioate
  modified_base 23: mod_base = OTHER; note = 2'-O-methylguanosine-3'-phosphate
  misc_feature 1..4: note = RNA
  misc_feature 5: note = DNA
  misc_feature 6: note = RNA
  misc_feature 7: note = DNA
  misc_feature 8..23: note = RNA
agcttgtctcccagtgggtcctg

SEQ ID NO: 7901 - DNA, 23 bp, synthetic construct
  source 1..23: mol_type = other DNA
  modified_base 1: mod_base = OTHER; note = 2'-O-methyladenosine-3'-phosphorothioate
  modified_base 2: mod_base = OTHER; note = 2'-fluoroadenosine-3'-phosphorothioate
  modified_base 3: mod_base = OTHER; note = 2'-O-methyluridine-3'-phosphate
  modified_base 4: mod_base = OTHER; note = 2'-O-methylguanosine-3'-phosphate
  modified_base 6: mod_base = OTHER; note = 2'-O-methyluridine-3'-phosphate
  modified_base 7: mod_base = OTHER; note = Thymidine-glycol nucleic acid (GNA) S-Isomer
  modified_base 8: mod_base = OTHER; note = 2'-O-methylguanosine-3'-phosphate
  modified_base 9: mod_base = OTHER; note = 2'-O-methyluridine-3'-phosphate
  modified_base 10: mod_base = OTHER; note = 2'-O-methylcytidine-3'-phosphate
  modified_base 11: mod_base = OTHER; note = 2'-O-methyluridine-3'-phosphate
  modified_base 12: mod_base = OTHER; note = 2'-O-methylcytidine-3'-phosphate
  modified_base 13: mod_base = OTHER; note = 2'-O-methylcytidine-3'-phosphate
  modified_base 14: mod_base = OTHER; note = 2'-fluorocytidine-3'-phosphate
  modified_base 15: mod_base = OTHER; note = 2'-O-methyladenosine-3'-phosphate
  modified_base 16: mod_base = OTHER; note = 2'-fluoroguanosine-3'-phosphate
  modified_base 17: mod_base = OTHER; note = 2'-O-methyluridine-3'-phosphate
  modified_base 18: mod_base = OTHER; note = 2'-O-methylguanosine-3'-phosphate
  modified_base 19: mod_base = OTHER; note = 2'-O-methylguanosine-3'-phosphate
  modified_base 20: mod_base = OTHER; note = 2'-O-methylguanosine-3'-phosphate
  modified_base 21: mod_base = OTHER; note = 2'-O-methyluridine-3'-phosphorothioate
  modified_base 22: mod_base = OTHER; note = 2'-O-methylcytidine-3'-phosphorothioate
  modified_base 23: mod_base = OTHER; note = 2'-O-methylcytidine-3'-phosphate
  misc_feature 1..4: note = RNA
  misc_feature 5: note = DNA
  misc_feature 6: note = RNA
  misc_feature 7: note = DNA
  misc_feature 8..23: note = RNA
aatgcttgtctcccagtgggtcc

SEQ ID NO: 7902 - DNA, 23 bp, synthetic construct
  source 1..23: mol_type = other DNA
  modified_base 1: mod_base = OTHER; note = 2'-O-methyladenosine-3'-phosphorothioate
  modified_base 2: mod_base = OTHER; note = 2'-fluoroadenosine-3'-phosphorothioate
  modified_base 3: mod_base = OTHER; note = 2'-O-methyladenosine-3'-phosphate
  modified_base 4: mod_base = OTHER; note = 2'-O-methyluridine-3'-phosphate
  modified_base 6: mod_base = OTHER; note = 2'-O-methylcytidine-3'-phosphate
  modified_base 7: mod_base = OTHER; note = Thymidine-glycol nucleic acid (GNA) S-Isomer
  modified_base 8: mod_base = OTHER; note = 2'-O-methyluridine-3'-phosphate
  modified_base 9: mod_base = OTHER; note = 2'-O-methylguanosine-3'-phosphate
  modified_base 10: mod_base = OTHER; note = 2'-O-methyluridine-3'-phosphate
  modified_base 11: mod_base = OTHER; note = 2'-O-methylcytidine-3'-phosphate
  modified_base 12: mod_base = OTHER; note = 2'-O-methyluridine-3'-phosphate
  modified_base 13: mod_base = OTHER; note = 2'-O-methylcytidine-3'-phosphate
  modified_base 14: mod_base = OTHER; note = 2'-fluorocytidine-3'-phosphate
  modified_base 15: mod_base = OTHER; note = 2'-O-methylcytidine-3'-phosphate
  modified_base 16: mod_base = OTHER; note = 2'-fluoroadenosine-3'-phosphate
  modified_base 17: mod_base = OTHER; note = 2'-O-methylguanosine-3'-phosphate
  modified_base 18: mod_base = OTHER; note = 2'-O-methyluridine-3'-phosphate
  modified_base 19: mod_base = OTHER; note = 2'-O-methylguanosine-3'-phosphate
  modified_base 20: mod_base = OTHER; note = 2'-O-methylguanosine-3'-phosphate
  modified_base 21: mod_base = OTHER; note = 2'-O-methylguanosine-3'-phosphorothioate
  modified_base 22: mod_base = OTHER; note = 2'-O-methyluridine-3'-phosphorothioate
  modified_base 23: mod_base = OTHER; note = 2'-O-methylcytidine-3'-phosphate
  misc_feature 1..4: note = RNA
  misc_feature 5: note = DNA
  misc_feature 6: note = RNA
  misc_feature 7: note = DNA
  misc_feature 8..23: note = RNA
aaatgcttgtctcccagtgggtc

SEQ ID NO: 7903 - DNA, 23 bp, synthetic construct
  source 1..23: mol_type = other DNA
  modified_base 1: mod_base = OTHER; note = 2'-O-methyladenosine-3'-phosphorothioate
  modified_base 2: mod_base = OTHER; note = 2'-fluoroadenosine-3'-phosphorothioate
  modified_base 3: mod_base = OTHER; note = 2'-O-methyladenosine-3'-phosphate
  modified_base 4: mod_base = OTHER; note = 2'-O-methyladenosine-3'-phosphate
  modified_base 6: mod_base = OTHER; note = 2'-O-methyluridine-3'-phosphate
  modified_base 7: mod_base = OTHER; note = Adenosine-glycol nucleic acid (GNA)
  modified_base 8: mod_base = OTHER; note = 2'-O-methyluridine-3'-phosphate
  modified_base 9: mod_base = OTHER; note = 2'-O-methyladenosine-3'-phosphate
  modified_base 10: mod_base = OTHER; note = 2'-O-methyladenosine-3'-phosphate
  modified_base 11: mod_base = OTHER; note = 2'-O-methyladenosine-3'-phosphate
  modified_base 12: mod_base = OTHER; note = 2'-O-methyluridine-3'-phosphate
  modified_base 13: mod_base = OTHER; note = 2'-O-methylguanosine-3'-phosphate
  modified_base 14: mod_base = OTHER; note = 2'-fluorocytidine-3'-phosphate
  modified_base 15: mod_base = OTHER; note = 2'-O-methyluridine-3'-phosphate
  modified_base 16: mod_base = OTHER; note = 2'-fluorouridine-3'-phosphate
  modified_base 17: mod_base = OTHER; note = 2'-O-methylguanosine-3'-phosphate
  modified_base 18: mod_base = OTHER; note = 2'-O-methyluridine-3'-phosphate
  modified_base 19: mod_base = OTHER; note = 2'-O-methylcytidine-3'-phosphate
  modified_base 20: mod_base = OTHER; note = 2'-O-methyluridine-3'-phosphate
  modified_base 21: mod_base = OTHER; note = 2'-O-methylcytidine-3'-phosphorothioate
  modified_base 22: mod_base = OTHER; note = 2'-O-methylcytidine-3'-phosphorothioate
  modified_base 23: mod_base = OTHER; note = 2'-O-methylcytidine-3'-phosphate
  misc_feature 1..4: note = RNA
  misc_feature 5: note = DNA
  misc_feature 6..23: note = RNA
aaaagtataaatgcttgtctccc

SEQ ID NO: 7904 - DNA, 23 bp, synthetic construct
  source 1..23: mol_type = other DNA
  modified_base 1: mod_base = OTHER; note = 2'-O-methyladenosine-3'-phosphorothioate
  modified_base 2: mod_base = OTHER; note = 2'-fluoroguanosine-3'-phosphorothioate
  modified_base 3: mod_base = OTHER; note = 2'-O-methyladenosine-3'-phosphate
  modified_base 4: mod_base = OTHER; note = 2'-O-methyladenosine-3'-phosphate
  modified_base 6: mod_base = OTHER; note = 2'-O-methylguanosine-3'-phosphate
  modified_base 7: mod_base = OTHER; note = Thymidine-glycol nucleic acid (GNA) S-Isomer
  modified_base 8: mod_base = OTHER; note = 2'-O-methyladenosine-3'-phosphate
  modified_base 9: mod_base = OTHER; note = 2'-O-methyluridine-3'-phosphate
  modified_base 10: mod_base = OTHER; note = 2'-O-methyladenosine-3'-phosphate
  modified_base 11: mod_base = OTHER; note = 2'-O-methyladenosine-3'-phosphate
  modified_base 12: mod_base = OTHER; note = 2'-O-methyladenosine-3'-phosphate
  modified_base 13: mod_base = OTHER; note = 2'-O-methyluridine-3'-phosphate
  modified_base 14: mod_base = OTHER; note = 2'-fluoroguanosine-3'-phosphate
  modified_base 15: mod_base = OTHER; note = 2'-O-methylcytidine-3'-phosphate
  modified_base 16: mod_base = OTHER; note = 2'-fluorouridine-3'-phosphate
  modified_base 17: mod_base = OTHER; note = 2'-O-methyluridine-3'-phosphate
  modified_base 18: mod_base = OTHER; note = 2'-O-methylguanosine-3'-phosphate
  modified_base 19: mod_base = OTHER; note = 2'-O-methyluridine-3'-phosphate
  modified_base 20: mod_base = OTHER; note = 2'-O-methylcytidine-3'-phosphate
  modified_base 21: mod_base = OTHER; note = 2'-O-methyluridine-3'-phosphorothioate
  modified_base 22: mod_base = OTHER; note = 2'-O-methylcytidine-3'-phosphorothioate
  modified_base 23: mod_base = OTHER; note = 2'-O-methylcytidine-3'-phosphate
  misc_feature 1..4: note = RNA
  misc_feature 5: note = DNA
  misc_feature 6: note = RNA
  misc_feature 7: note = DNA
  misc_feature 8..23: note = RNA
agaaagtataaatgcttgtctcc

SEQ ID NO: 7905 - DNA, 23 bp, synthetic construct
  source 1..23: mol_type = other DNA
  modified_base 1: mod_base = OTHER; note = 2'-O-methyladenosine-3'-phosphorothioate
  modified_base 2: mod_base = OTHER; note = 2'-fluoroguanosine-3'-phosphorothioate
  modified_base 3: mod_base = OTHER; note = 2'-O-methylcytidine-3'-phosphate
  modified_base 4: mod_base = OTHER; note = 2'-O-methylcytidine-3'-phosphate
  modified_base 6: mod_base = OTHER; note = 2'-O-methyladenosine-3'-phosphate
  modified_base 7: mod_base = OTHER; note = Thymidine-glycol nucleic acid (GNA) S-Isomer
  modified_base 8: mod_base = OTHER; note = 2'-O-methylcytidine-3'-phosphate
  modified_base 9: mod_base = OTHER; note = 2'-O-methyluridine-3'-phosphate
  modified_base 10: mod_base = OTHER; note = 2'-O-methylcytidine-3'-phosphate
  modified_base 11: mod_base = OTHER; note = 2'-O-methylcytidine-3'-phosphate
  modified_base 12: mod_base = OTHER; note = 2'-O-methylcytidine-3'-phosphate
  modified_base 13: mod_base = OTHER; note = 2'-O-methyluridine-3'-phosphate
  modified_base 14: mod_base = OTHER; note = 2'-fluorocytidine-3'-phosphate
  modified_base 15: mod_base = OTHER; note = 2'-O-methyluridine-3'-phosphate
  modified_base 16: mod_base = OTHER; note = 2'-fluorouridine-3'-phosphate
  modified_base 17: mod_base = OTHER; note = 2'-O-methylguanosine-3'-phosphate
  modified_base 18: mod_base = OTHER; note = 2'-O-methyladenosine-3'-phosphate
  modified_base 19: mod_base = OTHER; note = 2'-O-methylcytidine-3'-phosphate
  modified_base 20: mod_base = OTHER; note = 2'-O-methylcytidine-3'-phosphate
  modified_base 21: mod_base = OTHER; note = 2'-O-methyluridine-3'-phosphorothioate
  modified_base 22: mod_base = OTHER; note = 2'-O-methyluridine-3'-phosphorothioate
  modified_base 23: mod_base = OTHER; note = 2'-O-methylcytidine-3'-phosphate
  misc_feature 1..4: note = RNA
  misc_feature 5: note = DNA
  misc_feature 6: note = RNA
  misc_feature 7: note = DNA
  misc_feature 8..23: note = RNA
agcccatctccctcttgaccttc

SEQ ID NO: 7906 - DNA, 23 bp, synthetic construct
  source 1..23: mol_type = other DNA
  modified_base 1: mod_base = OTHER; note = 2'-O-methyladenosine-3'-phosphorothioate
  modified_base 2: mod_base = OTHER; note = 2'-deoxycytidine-3'-phosphorothioate
  modified_base 3: mod_base = OTHER; note = 2'-O-methyluridine-3'-phosphate
  modified_base 4: mod_base = OTHER; note = 2'-O-methylguanosine-3'-phosphate
  modified_base 6: mod_base = OTHER; note = 2'-O-methyluridine-3'-phosphate
  modified_base 8: mod_base = OTHER; note = 2'-O-methylguanosine-3'-phosphate
  modified_base 9: mod_base = OTHER; note = 2'-O-methyladenosine-3'-phosphate
  modified_base 10: mod_base = OTHER; note = 2'-O-methyluridine-3'-phosphate
  modified_base 11: mod_base = OTHER; note = 2'-O-methyladenosine-3'-phosphate
  modified_base 13: mod_base = OTHER; note = 2'-O-methylcytidine-3'-phosphate
  modified_base 14: mod_base = OTHER; note = 2'-fluorouridine-3'-phosphate
  modified_base 15: mod_base = OTHER; note = 2'-O-methylguanosine-3'-phosphate
  modified_base 16: mod_base = OTHER; note = 2'-O-methyluridine-3'-phosphate
  modified_base 17: mod_base = OTHER; note = 2'-O-methylguanosine-3'-phosphate
  modified_base 18: mod_base = OTHER; note = 2'-O-methylcytidine-3'-phosphate
  modified_base 19: mod_base = OTHER; note = 2'-O-methyluridine-3'-phosphate
  modified_base 20: mod_base = OTHER; note = 2'-O-methyluridine-3'-phosphate
  modified_base 21: mod_base = OTHER; note = 2'-O-methylguanosine-3'-phosphorothioate
  modified_base 22: mod_base = OTHER; note = 2'-O-methylcytidine-3'-phosphorothioate
  modified_base 23: mod_base = OTHER; note = 2'-O-methyluridine-3'-phosphate
  misc_feature 1: note = RNA
  misc_feature 2: note = DNA
  misc_feature 3..4: note = RNA
  misc_feature 5: note = DNA
  misc_feature 6: note = RNA
  misc_feature 7: note = DNA
  misc_feature 8..11: note = RNA
  misc_feature 12: note = DNA
  misc_feature 13..23: note = RNA
actgatggatagctgtgcttgct

SEQ ID NO: 7907 - DNA, 23 bp, synthetic construct
  source 1..23: mol_type = other DNA
  modified_base 1: mod_base = OTHER; note = 2'-O-methyladenosine-3'-phosphorothioate
  modified_base 2: mod_base = OTHER; note = 2'-deoxycytidine-3'-phosphorothioate
  modified_base 3: mod_base = OTHER; note = 2'-O-methyladenosine-3'-phosphate
  modified_base 4: mod_base = OTHER; note = 2'-O-methylguanosine-3'-phosphate
  modified_base 6: mod_base = OTHER; note = 2'-O-methyladenosine-3'-phosphate
  modified_base 8: mod_base = OTHER; note = 2'-O-methylguanosine-3'-phosphate
  modified_base 9: mod_base = OTHER; note = 2'-O-methylguanosine-3'-phosphate
  modified_base 10: mod_base = OTHER; note = 2'-O-methylcytidine-3'-phosphate
  modified_base 11: mod_base = OTHER; note = 2'-O-methyluridine-3'-phosphate
  modified_base 13: mod_base = OTHER; note = 2'-O-methyladenosine-3'-phosphate
  modified_base 14: mod_base = OTHER; note = 2'-fluoroadenosine-3'-phosphate
  modified_base 15: mod_base = OTHER; note = 2'-O-methyladenosine-3'-phosphate
  modified_base 16: mod_base = OTHER; note = 2'-O-methylguanosine-3'-phosphate
  modified_base 17: mod_base = OTHER; note = 2'-O-methyluridine-3'-phosphate
  modified_base 18: mod_base = OTHER; note = 2'-O-methyladenosine-3'-phosphate
  modified_base 19: mod_base = OTHER; note = 2'-O-methylguanosine-3'-phosphate
  modified_base 20: mod_base = OTHER; note = 2'-O-methyladenosine-3'-phosphate
  modified_base 21: mod_base = OTHER; note = 2'-O-methyluridine-3'-phosphorothioate
  modified_base 22: mod_base = OTHER; note = 2'-O-methylcytidine-3'-phosphorothioate
  modified_base 23: mod_base = OTHER; note = 2'-O-methyluridine-3'-phosphate
  misc_feature 1: note = RNA
  misc_feature 2: note = DNA
  misc_feature 3..4: note = RNA
  misc_feature 5: note = DNA
  misc_feature 6: note = RNA
  misc_feature 7: note = DNA
  misc_feature 8..11: note = RNA
  misc_feature 12: note = DNA
  misc_feature 13..23: note = RNA
acaggaaggctgaaagtagatct

SEQ ID NO: 7908 - DNA, 23 bp, synthetic construct
  source 1..23: mol_type = other DNA
  modified_base 1: mod_base = OTHER; note = 2'-O-methyladenosine-3'-phosphorothioate
  modified_base 2: mod_base = OTHER; note = 2'-deoxycytidine-3'-phosphorothioate
  modified_base 3: mod_base = OTHER; note = 2'-O-methylcytidine-3'-phosphate
  modified_base 4: mod_base = OTHER; note = 2'-O-methyladenosine-3'-phosphate
  modified_base 6: mod_base = OTHER; note = 2'-O-methylguanosine-3'-phosphate
  modified_base 8: mod_base = OTHER; note = 2'-O-methyluridine-3'-phosphate
  modified_base 9: mod_base = OTHER; note = 2'-O-methyluridine-3'-phosphate
  modified_base 10: mod_base = OTHER; note = 2'-O-methyluridine-3'-phosphate
  modified_base 11: mod_base = OTHER; note = 2'-O-methylguanosine-3'-phosphate
  modified_base 13: mod_base = OTHER; note = 2'-O-methyluridine-3'-phosphate
  modified_base 14: mod_base = OTHER; note = 2'-fluoroguanosine-3'-phosphate
  modified_base 15: mod_base = OTHER; note = 2'-O-methylcytidine-3'-phosphate
  modified_base 16: mod_base = OTHER; note = 2'-O-methyluridine-3'-phosphate
  modified_base 17: mod_base = OTHER; note = 2'-O-methyluridine-3'-phosphate
  modified_base 18: mod_base = OTHER; note = 2'-O-methylguanosine-3'-phosphate
  modified_base 19: mod_base = OTHER; note = 2'-O-methylguanosine-3'-phosphate
  modified_base 20: mod_base = OTHER; note = 2'-O-methylcytidine-3'-phosphate
  modified_base 21: mod_base = OTHER; note = 2'-O-methyluridine-3'-phosphorothioate
  modified_base 22: mod_base = OTHER; note = 2'-O-methylcytidine-3'-phosphorothioate
  modified_base 23: mod_base = OTHER; note = 2'-O-methyluridine-3'-phosphate
  misc_feature 1: note = RNA
  misc_feature 2: note = DNA
  misc_feature 3..4: note = RNA
  misc_feature 5: note = DNA
  misc_feature 6: note = RNA
  misc_feature 7: note = DNA
  misc_feature 8..11: note = RNA
  misc_feature 12: note = DNA
  misc_feature 13..23: note = RNA
accaggatttgctgcttggctct

SEQ ID NO: 7909 - DNA, 23 bp, synthetic construct
  source 1..23: mol_type = other DNA
  modified_base 1: mod_base = OTHER; note = 2'-O-methyladenosine-3'-phosphorothioate
  modified_base 2: mod_base = OTHER; note = 2'-deoxycytidine-3'-phosphorothioate
  modified_base 3: mod_base = OTHER; note = 2'-O-methyluridine-3'-phosphate
  modified_base 4: mod_base = OTHER; note = 2'-O-methylcytidine-3'-phosphate
  modified_base 6: mod_base = OTHER; note = 2'-O-methyladenosine-3'-phosphate
  modified_base 8: mod_base = OTHER; note = 2'-O-methylcytidine-3'-phosphate
  modified_base 9: mod_base = OTHER; note = 2'-O-methyladenosine-3'-phosphate
  modified_base 10: mod_base = OTHER; note = 2'-O-methyladenosine-3'-phosphate
  modified_base 11: mod_base = OTHER; note = 2'-O-methyladenosine-3'-phosphate
  modified_base 13: mod_base = OTHER; note = 2'-O-methyladenosine-3'-phosphate
  modified_base 14: mod_base = OTHER; note = 2'-fluoroguanosine-3'-phosphate
  modified_base 15: mod_base = OTHER; note = 2'-O-methyluridine-3'-phosphate
  modified_base 16: mod_base = OTHER; note = 2'-O-methylguanosine-3'-phosphate
  modified_base 17: mod_base = OTHER; note = 2'-O-methylcytidine-3'-phosphate
  modified_base 18: mod_base = OTHER; note = 2'-O-methylcytidine-3'-phosphate
  modified_base 19: mod_base = OTHER; note = 2'-O-methyladenosine-3'-phosphate
  modified_base 20: mod_base = OTHER; note = 2'-O-methylguanosine-3'-phosphate
  modified_base 21: mod_base = OTHER; note = 2'-O-methylguanosine-3'-phosphorothioate
  modified_base 22: mod_base = OTHER; note = 2'-O-methylcytidine-3'-phosphorothioate
  modified_base 23: mod_base = OTHER; note = 2'-O-methyluridine-3'-phosphate
  misc_feature 1: note = RNA
  misc_feature 2: note = DNA
  misc_feature 3..4: note = RNA
  misc_feature 5: note = DNA
  misc_feature 6: note = RNA
  misc_feature 7: note = DNA
  misc_feature 8..11: note = RNA
  misc_feature 12: note = DNA
  misc_feature 13..23: note = RNA
actcaagcaaagagtgccaggct

SEQ ID NO: 7910 - DNA, 23 bp, synthetic construct
  source 1..23: mol_type = other DNA
  modified_base 1: mod_base = OTHER; note = 2'-O-methyladenosine-3'-phosphorothioate
  modified_base 2: mod_base = OTHER; note = 2'-deoxycytidine-3'-phosphorothioate
  modified_base 3: mod_base = OTHER; note = 2'-O-methylcytidine-3'-phosphate
  modified_base 4: mod_base = OTHER; note = 2'-O-methyluridine-3'-phosphate
  modified_base 6: mod_base = OTHER; note = 2'-O-methyladenosine-3'-phosphate
  modified_base 8: mod_base = OTHER; note = 2'-O-methylguanosine-3'-phosphate
  modified_base 9: mod_base = OTHER; note = 2'-O-methylcytidine-3'-phosphate
  modified_base 10: mod_base = OTHER; note = 2'-O-methyladenosine-3'-phosphate
  modified_base 11: mod_base = OTHER; note = 2'-O-methyladenosine-3'-phosphate
  modified_base 13: mod_base = OTHER; note = 2'-O-methylguanosine-3'-phosphate
  modified_base 14: mod_base = OTHER; note = 2'-fluoroadenosine-3'-phosphate
  modified_base 15: mod_base = OTHER; note = 2'-O-methylguanosine-3'-phosphate
  modified_base 16: mod_base = OTHER; note = 2'-O-methyluridine-3'-phosphate
  modified_base 17: mod_base = OTHER; note = 2'-O-methylguanosine-3'-phosphate
  modified_base 18: mod_base = OTHER; note = 2'-O-methylcytidine-3'-phosphate
  modified_base 19: mod_base = OTHER; note = 2'-O-methylcytidine-3'-phosphate
  modified_base 20: mod_base = OTHER; note = 2'-O-methyladenosine-3'-phosphate
  modified_base 21: mod_base = OTHER; note = 2'-O-methylguanosine-3'-phosphorothioate
  modified_base 22: mod_base = OTHER; note = 2'-O-methylcytidine-3'-phosphorothioate
  modified_base 23: mod_base = OTHER; note = 2'-O-methyluridine-3'-phosphate
  misc_feature 1: note = RNA
  misc_feature 2: note = DNA
  misc_feature 3..4: note = RNA
  misc_feature 5: note = DNA
  misc_feature 6: note = RNA
  misc_feature 7: note = DNA
  misc_feature 8..11: note = RNA
  misc_feature 12: note = DNA
  misc_feature 13..23: note = RNA
acctcaagcaaagagtgccagct

SEQ ID NO: 7911 - DNA, 23 bp, synthetic construct
  source 1..23: mol_type = other DNA
  modified_base 1: mod_base = OTHER; note = 2'-O-methyladenosine-3'-phosphorothioate
  modified_base 2: mod_base = OTHER; note = 2'-deoxycytidine-3'-phosphorothioate
  modified_base 3: mod_base = OTHER; note = 2'-O-methylguanosine-3'-phosphate
  modified_base 4: mod_base = OTHER; note = 2'-O-methylguanosine-3'-phosphate
  modified_base 6: mod_base = OTHER; note = 2'-O-methyladenosine-3'-phosphate
  modified_base 8: mod_base = OTHER; note = 2'-O-methyladenosine-3'-phosphate
  modified_base 9: mod_base = OTHER; note = 2'-O-methyluridine-3'-phosphate
  modified_base 10: mod_base = OTHER; note = 2'-O-methylcytidine-3'-phosphate
  modified_base 11: mod_base = OTHER; note = 2'-O-methylcytidine-3'-phosphate
  modified_base 13: mod_base = OTHER; note = 2'-O-methylcytidine-3'-phosphate
  modified_base 14: mod_base = OTHER; note = 2'-fluoroadenosine-3'-phosphate
  modified_base 15: mod_base = OTHER; note = 2'-O-methyladenosine-3'-phosphate
  modified_base 16: mod_base = OTHER; note = 2'-O-methylguanosine-3'-phosphate
  modified_base 17: mod_base = OTHER; note = 2'-O-methylcytidine-3'-phosphate
  modified_base 18: mod_base = OTHER; note = 2'-O-methyladenosine-3'-phosphate
  modified_base 19: mod_base = OTHER; note = 2'-O-methyladenosine-3'-phosphate
  modified_base 20: mod_base = OTHER; note = 2'-O-methyladenosine-3'-phosphate
  modified_base 21: mod_base = OTHER; note = 2'-O-methylguanosine-3'-phosphorothioate
  modified_base 22: mod_base = OTHER; note = 2'-O-methylcytidine-3'-phosphorothioate
  modified_base 23: mod_base = OTHER; note = 2'-O-methyluridine-3'-phosphate
  misc_feature 1: note = RNA
  misc_feature 2: note = DNA
  misc_feature 3..4: note = RNA
  misc_feature 5: note = DNA
  misc_feature 6: note = RNA
  misc_feature 7: note = DNA
  misc_feature 8..11: note = RNA
  misc_feature 12: note = DNA
  misc_feature 13..23: note = RNA
acggaagatcctcaagcaaagct

SEQ ID NO: 7912 - DNA, 23 bp, synthetic construct
  source 1..23: mol_type = other DNA
  modified_base 1: mod_base = OTHER; note = 2'-O-methyladenosine-3'-phosphorothioate
  modified_base 2: mod_base = OTHER; note = 2'-deoxythimidine-3'-phosphorothioate
  modified_base 3: mod_base = OTHER; note = 2'-O-methylcytidine-3'-phosphate
  modified_base 4: mod_base = OTHER; note = 2'-O-methylguanosine-3'-phosphate
  modified_base 6: mod_base = OTHER; note = 2'-O-methyladenosine-3'-phosphate
  modified_base 8: mod_base = OTHER; note = 2'-O-methylguanosine-3'-phosphate
  modified_base 9: mod_base = OTHER; note = 2'-O-methyladenosine-3'-phosphate
  modified_base 10: mod_base = OTHER; note = 2'-O-methyluridine-3'-phosphate
  modified_base 11: mod_base = OTHER; note = 2'-O-methylcytidine-3'-phosphate
  modified_base 13: mod_base = OTHER; note = 2'-O-methyluridine-3'-phosphate
  modified_base 14: mod_base = OTHER; note = 2'-fluorocytidine-3'-phosphate
  modified_base 15: mod_base = OTHER; note = 2'-O-methyladenosine-3'-phosphate
  modified_base 16: mod_base = OTHER; note = 2'-O-methyladenosine-3'-phosphate
  modified_base 17: mod_base = OTHER; note = 2'-O-methylguanosine-3'-phosphate
  modified_base 18: mod_base = OTHER; note = 2'-O-methylcytidine-3'-phosphate
  modified_base 19: mod_base = OTHER; note = 2'-O-methyladenosine-3'-phosphate
  modified_base 20: mod_base = OTHER; note = 2'-O-methyladenosine-3'-phosphate
  modified_base 21: mod_base = OTHER; note = 2'-O-methyladenosine-3'-phosphorothioate
  modified_base 22: mod_base = OTHER; note = 2'-O-methylcytidine-3'-phosphorothioate
  modified_base 23: mod_base = OTHER; note = 2'-O-methyluridine-3'-phosphate
  misc_feature 1: note = RNA
  misc_feature 2: note = DNA
  misc_feature 3..4: note = RNA
  misc_feature 5: note = DNA
  misc_feature 6: note = RNA
  misc_feature 7: note = DNA
  misc_feature 8..11: note = RNA
  misc_feature 12: note = DNA
  misc_feature 13..23: note = RNA
atcggaagatcctcaagcaaact

SEQ ID NO: 7913 - DNA, 23 bp, synthetic construct
  source 1..23: mol_type = other DNA
  modified_base 1: mod_base = OTHER; note = 2'-O-methyladenosine-3'-phosphorothioate
  modified_base 2: mod_base = OTHER; note = 2'-deoxyadenosine-3'-phosphorothioate
  modified_base 3: mod_base = OTHER; note = 2'-O-methyluridine-3'-phosphate
  modified_base 4: mod_base = OTHER; note = 2'-O-methylcytidine-3'-phosphate
  modified_base 6: mod_base = OTHER; note = 2'-O-methylguanosine-3'-phosphate
  modified_base 8: mod_base = OTHER; note = 2'-O-methyladenosine-3'-phosphate
  modified_base 9: mod_base = OTHER; note = 2'-O-methylguanosine-3'-phosphate
  modified_base 10: mod_base = OTHER; note = 2'-O-methyladenosine-3'-phosphate
  modified_base 11: mod_base = OTHER; note = 2'-O-methyluridine-3'-phosphate
  modified_base 13: mod_base = OTHER; note = 2'-O-methylcytidine-3'-phosphate
  modified_base 14: mod_base = OTHER; note = 2'-fluorouridine-3'-phosphate
  modified_base 15: mod_base = OTHER; note = 2'-O-methylcytidine-3'-phosphate
  modified_base 16: mod_base = OTHER; note = 2'-O-methyladenosine-3'-phosphate
  modified_base 17: mod_base = OTHER; note = 2'-O-methyladenosine-3'-phosphate
  modified_base 18: mod_base = OTHER; note = 2'-O-methylguanosine-3'-phosphate
  modified_base 19: mod_base = OTHER; note = 2'-O-methylcytidine-3'-phosphate
  modified_base 20: mod_base = OTHER; note = 2'-O-methyladenosine-3'-phosphate
  modified_base 21: mod_base = OTHER; note = 2'-O-methyladenosine-3'-phosphorothioate
  modified_base 22: mod_base = OTHER; note = 2'-O-methylcytidine-3'-phosphorothioate
  modified_base 23: mod_base = OTHER; note = 2'-O-methyluridine-3'-phosphate
  misc_feature 1: note = RNA
  misc_feature 2: note = DNA
  misc_feature 3..4: note = RNA
  misc_feature 5: note = DNA
  misc_feature 6: note = RNA
  misc_feature 7: note = DNA
  misc_feature 8..11: note = RNA
  misc_feature 12: note = DNA
  misc_feature 13..23: note = RNA
aatcggaagatcctcaagcaact

SEQ ID NO: 7914 - DNA, 23 bp, synthetic construct
  source 1..23: mol_type = other DNA
  modified_base 1: mod_base = OTHER; note = 2'-O-methyladenosine-3'-phosphorothioate
  modified_base 2: mod_base = OTHER; note = 2'-deoxycytidine-3'-phosphorothioate
  modified_base 3: mod_base = OTHER; note = 2'-O-methyladenosine-3'-phosphate
  modified_base 4: mod_base = OTHER; note = 2'-O-methyluridine-3'-phosphate
  modified_base 6: mod_base = OTHER; note = 2'-O-methylguanosine-3'-phosphate
  modified_base 8: mod_base = OTHER; note = 2'-O-methyladenosine-3'-phosphate
  modified_base 9: mod_base = OTHER; note = 2'-O-methyladenosine-3'-phosphate
  modified_base 10: mod_base = OTHER; note = 2'-O-methylguanosine-3'-phosphate
  modified_base 11: mod_base = OTHER; note = 2'-O-methyladenosine-3'-phosphate
  modified_base 13: mod_base = OTHER; note = 2'-O-methylcytidine-3'-phosphate
  modified_base 14: mod_base = OTHER; note = 2'-fluorocytidine-3'-phosphate
  modified_base 15: mod_base = OTHER; note = 2'-O-methyluridine-3'-phosphate
  modified_base 16: mod_base = OTHER; note = 2'-O-methylcytidine-3'-phosphate
  modified_base 17: mod_base = OTHER; note = 2'-O-methyladenosine-3'-phosphate
  modified_base 18: mod_base = OTHER; note = 2'-O-methyladenosine-3'-phosphate
  modified_base 19: mod_base = OTHER; note = 2'-O-methylguanosine-3'-phosphate
  modified_base 20: mod_base = OTHER; note = 2'-O-methylcytidine-3'-phosphate
  modified_base 21: mod_base = OTHER; note = 2'-O-methyladenosine-3'-phosphorothioate
  modified_base 22: mod_base = OTHER; note = 2'-O-methylcytidine-3'-phosphorothioate
  modified_base 23: mod_base = OTHER; note = 2'-O-methyluridine-3'-phosphate
  misc_feature 1: note = RNA
  misc_feature 2: note = DNA
  misc_feature 3..4: note = RNA
  misc_feature 5: note = DNA
  misc_feature 6: note = RNA
  misc_feature 7: note = DNA
  misc_feature 8..11: note = RNA
  misc_feature 12: note = DNA
  misc_feature 13..23: note = RNA
acatcggaagatcctcaagcact

SEQ ID NO: 7915 - DNA, 23 bp, synthetic construct
  source 1..23: mol_type = other DNA
  modified_base 1: mod_base = OTHER; note = 2'-O-methyladenosine-3'-phosphorothioate
  modified_base 2: mod_base = OTHER; note = 2'-deoxycytidine-3'-phosphorothioate
  modified_base 3: mod_base = OTHER; note = 2'-O-methylcytidine-3'-phosphate
  modified_base 4: mod_base = OTHER; note = 2'-O-methyladenosine-3'-phosphate
  modified_base 6: mod_base = OTHER; note = 2'-O-methylcytidine-3'-phosphate
  modified_base 8: mod_base = OTHER; note = 2'-O-methylguanosine-3'-phosphate
  modified_base 9: mod_base = OTHER; note = 2'-O-methyladenosine-3'-phosphate
  modified_base 10: mod_base = OTHER; note = 2'-O-methyladenosine-3'-phosphate
  modified_base 11: mod_base = OTHER; note = 2'-O-methylguanosine-3'-phosphate
  modified_base 13: mod_base = OTHER; note = 2'-O-methyluridine-3'-phosphate
  modified_base 14: mod_base = OTHER; note = 2'-fluorocytidine-3'-phosphate
  modified_base 15: mod_base = OTHER; note = 2'-O-methylcytidine-3'-phosphate
  modified_base 16: mod_base = OTHER; note = 2'-O-methyluridine-3'-phosphate
  modified_base 17: mod_base = OTHER; note = 2'-O-methylcytidine-3'-phosphate
  modified_base 18: mod_base = OTHER; note = 2'-O-methyladenosine-3'-phosphate
  modified_base 19: mod_base = OTHER; note = 2'-O-methyladenosine-3'-phosphate
  modified_base 20: mod_base = OTHER; note = 2'-O-methylguanosine-3'-phosphate
  modified_base 21: mod_base = OTHER; note = 2'-O-methylcytidine-3'-phosphorothioate
  modified_base 22: mod_base = OTHER; note = 2'-O-methylcytidine-3'-phosphorothioate
  modified_base 23: mod_base = OTHER; note = 2'-O-methyluridine-3'-phosphate
  misc_feature 1: note = RNA
  misc_feature 2: note = DNA
  misc_feature 3..4: note = RNA
  misc_feature 5: note = DNA
  misc_feature 6: note = RNA
  misc_feature 7: note = DNA
  misc_feature 8..11: note = RNA
  misc_feature 12: note = DNA
  misc_feature 13..23: note = RNA
accatcggaagatcctcaagcct

SEQ ID NO: 7916 - DNA, 23 bp, synthetic construct
  source 1..23: mol_type = other DNA
  modified_base 1: mod_base = OTHER; note = 2'-O-methyladenosine-3'-phosphorothioate
  modified_base 2: mod_base = OTHER; note = 2'-deoxycytidine-3'-phosphorothioate
  modified_base 3: mod_base = OTHER; note = 2'-O-methyladenosine-3'-phosphate
  modified_base 4: mod_base = OTHER; note = 2'-O-methylguanosine-3'-phosphate
  modified_base 6: mod_base = OTHER; note = 2'-O-methyluridine-3'-phosphate
  modified_base 8: mod_base = OTHER; note = 2'-O-methylguanosine-3'-phosphate
  modified_base 9: mod_base = OTHER; note = 2'-O-methylguanosine-3'-phosphate
  modified_base 10: mod_base = OTHER; note = 2'-O-methyluridine-3'-phosphate
  modified_base 11: mod_base = OTHER; note = 2'-O-methylguanosine-3'-phosphate
  modified_base 13: mod_base = OTHER; note = 2'-O-methyluridine-3'-phosphate
  modified_base 14: mod_base = OTHER; note = 2'-fluoroguanosine-3'-phosphate
  modified_base 15: mod_base = OTHER; note = 2'-O-methyluridine-3'-phosphate
  modified_base 16: mod_base = OTHER; note = 2'-O-methylguanosine-3'-phosphate
  modified_base 17: mod_base = OTHER; note = 2'-O-methylguanosine-3'-phosphate
  modified_base 18: mod_base = OTHER; note = 2'-O-methyluridine-3'-phosphate
  modified_base 19: mod_base = OTHER; note = 2'-O-methylguanosine-3'-phosphate
  modified_base 20: mod_base = OTHER; note = 2'-O-methylcytidine-3'-phosphate
  modified_base 21: mod_base = OTHER; note = 2'-O-methyluridine-3'-phosphorothioate
  modified_base 22: mod_base = OTHER; note = 2'-O-methylcytidine-3'-phosphorothioate
  modified_base 23: mod_base = OTHER; note = 2'-O-methyluridine-3'-phosphate
  misc_feature 1: note = RNA
  misc_feature 2: note = DNA
  misc_feature 3..4: note = RNA
  misc_feature 5: note = DNA
  misc_feature 6: note = RNA
  misc_feature 7: note = DNA
  misc_feature 8..11: note = RNA
  misc_feature 12: note = DNA
  misc_feature 13..23: note = RNA
acaggttggtgatgtggtgctct

SEQ ID NO: 7917 - DNA, 23 bp, synthetic construct
  source 1..23: mol_type = other DNA
  modified_base 1: mod_base = OTHER; note = 2'-O-methyladenosine-3'-phosphorothioate
  modified_base 2: mod_base = OTHER; note = 2'-deoxycytidine-3'-phosphorothioate
  modified_base 3: mod_base = OTHER; note = 2'-O-methyladenosine-3'-phosphate
  modified_base 4: mod_base = OTHER; note = 2'-O-methylguanosine-3'-phosphate
  modified_base 6: mod_base = OTHER; note = 2'-O-methyluridine-3'-phosphate
  modified_base 8: mod_base = OTHER; note = 2'-O-methylcytidine-3'-phosphate
  modified_base 9: mod_base = OTHER; note = 2'-O-methyluridine-3'-phosphate
  modified_base 10: mod_base = OTHER; note = 2'-O-methylguanosine-3'-phosphate
  modified_base 11: mod_base = OTHER; note = 2'-O-methylguanosine-3'-phosphate
  modified_base 13: mod_base = OTHER; note = 2'-O-methyladenosine-3'-phosphate
  modified_base 14: mod_base = OTHER; note = 2'-fluoroguanosine-3'-phosphate
  modified_base 15: mod_base = OTHER; note = 2'-O-methyluridine-3'-phosphate
  modified_base 16: mod_base = OTHER; note = 2'-O-methylcytidine-3'-phosphate
  modified_base 17: mod_base = OTHER; note = 2'-O-methyluridine-3'-phosphate
  modified_base 18: mod_base = OTHER; note = 2'-O-methyladenosine-3'-phosphate
  modified_base 19: mod_base = OTHER; note = 2'-O-methylcytidine-3'-phosphate
  modified_base 20: mod_base = OTHER; note = 2'-O-methylguanosine-3'-phosphate
  modified_base 21: mod_base = OTHER; note = 2'-O-methyluridine-3'-phosphorothioate
  modified_base 22: mod_base = OTHER; note = 2'-O-methylcytidine-3'-phosphorothioate
  modified_base 23: mod_base = OTHER; note = 2'-O-methyluridine-3'-phosphate
  misc_feature 1: note = RNA
  misc_feature 2: note = DNA
  misc_feature 3..4: note = RNA
  misc_feature 5: note = DNA
  misc_feature 6: note = RNA
  misc_feature 7: note = DNA
  misc_feature 8..11: note = RNA
  misc_feature 12: note = DNA
  misc_feature 13..23: note = RNA
acagttcctggaagtctacgtct

SEQ ID NO: 7918 - DNA, 23 bp, synthetic construct
  source 1..23: mol_type = other DNA
  modified_base 1: mod_base = OTHER; note = 2'-O-methyladenosine-3'-phosphorothioate
  modified_base 2: mod_base = OTHER; note = 2'-deoxycytidine-3'-phosphorothioate
  modified_base 3: mod_base = OTHER; note = 2'-O-methylcytidine-3'-phosphate
  modified_base 4: mod_base = OTHER; note = 2'-O-methyladenosine-3'-phosphate
  modified_base 6: mod_base = OTHER; note = 2'-O-methyluridine-3'-phosphate
  modified_base 8: mod_base = OTHER; note = 2'-O-methylcytidine-3'-phosphate
  modified_base 9: mod_base = OTHER; note = 2'-O-methylcytidine-3'-phosphate
  modified_base 10: mod_base = OTHER; note = 2'-O-methyluridine-3'-phosphate
  modified_base 11: mod_base = OTHER; note = 2'-O-methylguanosine-3'-phosphate
  modified_base 13: mod_base = OTHER; note = 2'-O-methyladenosine-3'-phosphate
  modified_base 14: mod_base = OTHER; note = 2'-fluoroadenosine-3'-phosphate
  modified_base 15: mod_base = OTHER; note = 2'-O-methylguanosine-3'-phosphate
  modified_base 16: mod_base = OTHER; note = 2'-O-methyluridine-3'-phosphate
  modified_base 17: mod_base = OTHER; note = 2'-O-methylcytidine-3'-phosphate
  modified_base 18: mod_base = OTHER; note = 2'-O-methyluridine-3'-phosphate
  modified_base 19: mod_base = OTHER; note = 2'-O-methyladenosine-3'-phosphate
  modified_base 20: mod_base = OTHER; note = 2'-O-methylcytidine-3'-phosphate
  modified_base 21: mod_base = OTHER; note = 2'-O-methylguanosine-3'-phosphorothioate
  modified_base 22: mod_base = OTHER; note = 2'-O-methylcytidine-3'-phosphorothioate
  modified_base 23: mod_base = OTHER; note = 2'-O-methyluridine-3'-phosphate
  misc_feature 1: note = RNA
  misc_feature 2: note = DNA
  misc_feature 3..4: note = RNA
  misc_feature 5: note = DNA
  misc_feature 6: note = RNA
  misc_feature 7: note = DNA
  misc_feature 8..11: note = RNA
  misc_feature 12: note = DNA
  misc_feature 13..23: note = RNA
accagttcctggaagtctacgct

SEQ ID NO: 7919 - DNA, 23 bp, synthetic construct
  source 1..23: mol_type = other DNA
  modified_base 1: mod_base = OTHER; note = 2'-O-methyladenosine-3'-phosphorothioate
  modified_base 2: mod_base = OTHER; note = 2'-deoxycytidine-3'-phosphorothioate
  modified_base 3: mod_base = OTHER; note = 2'-O-methyladenosine-3'-phosphate
  modified_base 4: mod_base = OTHER; note = 2'-O-methyluridine-3'-phosphate
  modified_base 6: mod_base = OTHER; note = 2'-O-methylcytidine-3'-phosphate
  modified_base 8: mod_base = OTHER; note = 2'-O-methyladenosine-3'-phosphate
  modified_base 9: mod_base = OTHER; note = 2'-O-methylguanosine-3'-phosphate
  modified_base 10: mod_base = OTHER; note = 2'-O-methyluridine-3'-phosphate
  modified_base 11: mod_base = OTHER; note = 2'-O-methyluridine-3'-phosphate
  modified_base 13: mod_base = OTHER; note = 2'-O-methylcytidine-3'-phosphate
  modified_base 14: mod_base = OTHER; note = 2'-fluorouridine-3'-phosphate
  modified_base 15: mod_base = OTHER; note = 2'-O-methylguanosine-3'-phosphate
  modified_base 16: mod_base = OTHER; note = 2'-O-methylguanosine-3'-phosphate
  modified_base 17: mod_base = OTHER; note = 2'-O-methyladenosine-3'-phosphate
  modified_base 18: mod_base = OTHER; note = 2'-O-methyladenosine-3'-phosphate
  modified_base 19: mod_base = OTHER; note = 2'-O-methylguanosine-3'-phosphate
  modified_base 20: mod_base = OTHER; note = 2'-O-methyluridine-3'-phosphate
  modified_base 21: mod_base = OTHER; note = 2'-O-methylcytidine-3'-phosphorothioate
  modified_base 22: mod_base = OTHER; note = 2'-O-methylcytidine-3'-phosphorothioate
  modified_base 23: mod_base = OTHER; note = 2'-O-methyluridine-3'-phosphate
  misc_feature 1: note = RNA
  misc_feature 2: note = DNA
  misc_feature 3..4: note = RNA
  misc_feature 5: note = DNA
  misc_feature 6: note = RNA
  misc_feature 7: note = DNA
  misc_feature 8..11: note = RNA
  misc_feature 12: note = DNA
  misc_feature 13..23: note = RNA
acatcccagttcctggaagtcct

SEQ ID NO: 7920 - DNA, 23 bp, synthetic construct
  source 1..23: mol_type = other DNA
  modified_base 1: mod_base = OTHER; note = 2'-O-methyladenosine-3'-phosphorothioate
  modified_base 2: mod_base = OTHER; note = 2'-deoxycytidine-3'-phosphorothioate
  modified_base 3: mod_base = OTHER; note = 2'-O-methyladenosine-3'-phosphate
  modified_base 4: mod_base = OTHER; note = 2'-O-methylguanosine-3'-phosphate
  modified_base 6: mod_base = OTHER; note = 2'-O-methyladenosine-3'-phosphate
  modified_base 8: mod_base = OTHER; note = 2'-O-methylguanosine-3'-phosphate
  modified_base 9: mod_base = OTHER; note = 2'-O-methylguanosine-3'-phosphate
  modified_base 10: mod_base = OTHER; note = 2'-O-methyladenosine-3'-phosphate
  modified_base 11: mod_base = OTHER; note = 2'-O-methyladenosine-3'-phosphate
  modified_base 13: mod_base = OTHER; note = 2'-O-methylguanosine-3'-phosphate
  modified_base 14: mod_base = OTHER; note = 2'-fluoroadenosine-3'-phosphate
  modified_base 15: mod_base = OTHER; note = 2'-O-methylguanosine-3'-phosphate
  modified_base 16: mod_base = OTHER; note = 2'-O-methylguanosine-3'-phosphate
  modified_base 17: mod_base = OTHER; note = 2'-O-methylcytidine-3'-phosphate
  modified_base 18: mod_base = OTHER; note = 2'-O-methyladenosine-3'-phosphate
  modified_base 19: mod_base = OTHER; note = 2'-O-methylguanosine-3'-phosphate
  modified_base 20: mod_base = OTHER; note = 2'-O-methylcytidine-3'-phosphate
  modified_base 21: mod_base = OTHER; note = 2'-O-methyladenosine-3'-phosphorothioate
  modified_base 22: mod_base = OTHER; note = 2'-O-methylcytidine-3'-phosphorothioate
  modified_base 23: mod_base = OTHER; note = 2'-O-methyluridine-3'-phosphate
  misc_feature 1: note = RNA
  misc_feature 2: note = DNA
  misc_feature 3..4: note = RNA
  misc_feature 5: note = DNA
  misc_feature 6: note = RNA
  misc_feature 7: note = DNA
  misc_feature 8..11: note = RNA
  misc_feature 12: note = DNA
  misc_feature 13..23: note = RNA
acagaatggaaagaggcagcact

SEQ ID NO: 7921 - DNA, 23 bp, synthetic construct
  source 1..23: mol_type = other DNA
  modified_base 1: mod_base = OTHER; note = 2'-O-methyladenosine-3'-phosphorothioate
  modified_base 2: mod_base = OTHER; note = 2'-deoxyguanosine-3'-phosphorothioate
  modified_base 3: mod_base = OTHER; note = 2'-O-methylcytidine-3'-phosphate
  modified_base 4: mod_base = OTHER; note = 2'-O-methyladenosine-3'-phosphate
  modified_base 6: mod_base = OTHER; note = 2'-O-methyladenosine-3'-phosphate
  modified_base 8: mod_base = OTHER; note = 2'-O-methyluridine-3'-phosphate
  modified_base 9: mod_base = OTHER; note = 2'-O-methylguanosine-3'-phosphate
  modified_base 10: mod_base = OTHER; note = 2'-O-methylguanosine-3'-phosphate
  modified_base 11: mod_base = OTHER; note = 2'-O-methyladenosine-3'-phosphate
  modified_base 13: mod_base = OTHER; note = 2'-O-methyladenosine-3'-phosphate
  modified_base 14: mod_base = OTHER; note = 2'-fluoroguanosine-3'-phosphate
  modified_base 15: mod_base = OTHER; note = 2'-O-methyladenosine-3'-phosphate
  modified_base 16: mod_base = OTHER; note = 2'-O-methylguanosine-3'-phosphate
  modified_base 17: mod_base = OTHER; note = 2'-O-methylguanosine-3'-phosphate
  modified_base 18: mod_base = OTHER; note = 2'-O-methylcytidine-3'-phosphate
  modified_base 19: mod_base = OTHER; note = 2'-O-methyladenosine-3'-phosphate
  modified_base 20: mod_base = OTHER; note = 2'-O-methylguanosine-3'-phosphate
  modified_base 21: mod_base = OTHER; note = 2'-O-methylcytidine-3'-phosphorothioate
  modified_base 22: mod_base = OTHER; note = 2'-O-methylcytidine-3'-phosphorothioate
  modified_base 23: mod_base = OTHER; note = 2'-O-methyluridine-3'-phosphate
  misc_feature 1: note = RNA
  misc_feature 2: note = DNA
  misc_feature 3..4: note = RNA
  misc_feature 5: note = DNA
  misc_feature 6: note = RNA
  misc_feature 7: note = DNA
  misc_feature 8..11: note = RNA
  misc_feature 12: note = DNA
  misc_feature 13..23: note = RNA
agcagaatggaaagaggcagcct

SEQ ID NO: 7922 - DNA, 23 bp, synthetic construct
  source 1..23: mol_type = other DNA
  modified_base 1: mod_base = OTHER; note = 2'-O-methyladenosine-3'-phosphorothioate
  modified_base 2: mod_base = OTHER; note = 2'-deoxyguanosine-3'-phosphorothioate
  modified_base 3: mod_base = OTHER; note = 2'-O-methylguanosine-3'-phosphate
  modified_base 4: mod_base = OTHER; note = 2'-O-methylcytidine-3'-phosphate
  modified_base 6: mod_base = OTHER; note = 2'-O-methylguanosine-3'-phosphate
  modified_base 8: mod_base = OTHER; note = 2'-O-methyladenosine-3'-phosphate
  modified_base 9: mod_base = OTHER; note = 2'-O-methyluridine-3'-phosphate
  modified_base 10: mod_base = OTHER; note = 2'-O-methylguanosine-3'-phosphate
  modified_base 11: mod_base = OTHER; note = 2'-O-methylguanosine-3'-phosphate
  modified_base 13: mod_base = OTHER; note = 2'-O-methyladenosine-3'-phosphate
  modified_base 14: mod_base = OTHER; note = 2'-fluoroadenosine-3'-phosphate
  modified_base 15: mod_base = OTHER; note = 2'-O-methylguanosine-3'-phosphate
  modified_base 16: mod_base = OTHER; note = 2'-O-methyladenosine-3'-phosphate
  modified_base 17: mod_base = OTHER; note = 2'-O-methylguanosine-3'-phosphate
  modified_base 18: mod_base = OTHER; note = 2'-O-methylguanosine-3'-phosphate
  modified_base 19: mod_base = OTHER; note = 2'-O-methylcytidine-3'-phosphate
  modified_base 20: mod_base = OTHER; note = 2'-O-methyladenosine-3'-phosphate
  modified_base 21: mod_base = OTHER; note = 2'-O-methylguanosine-3'-phosphorothioate
  modified_base 22: mod_base = OTHER; note = 2'-O-methylcytidine-3'-phosphorothioate
  modified_base 23: mod_base = OTHER; note = 2'-O-methyluridine-3'-phosphate
  misc_feature 1: note = RNA
  misc_feature 2: note = DNA
  misc_feature 3..4: note = RNA
  misc_feature 5: note = DNA
  misc_feature 6: note = RNA
  misc_feature 7: note = DNA
  misc_feature 8..11: note = RNA
  misc_feature 12: note = DNA
  misc_feature 13..23: note = RNA
aggcagaatggaaagaggcagct

SEQ ID NO: 7923 - DNA, 23 bp, synthetic construct
  source 1..23: mol_type = other DNA
  modified_base 1: mod_base = OTHER; note = 2'-O-methyladenosine-3'-phosphorothioate
  modified_base 2: mod_base = OTHER; note = 2'-deoxycytidine-3'-phosphorothioate
  modified_base 3: mod_base = OTHER; note = 2'-O-methyluridine-3'-phosphate
  modified_base 4: mod_base = OTHER; note = 2'-O-methylguanosine-3'-phosphate
  modified_base 6: mod_base = OTHER; note = 2'-O-methyladenosine-3'-phosphate
  modified_base 8: mod_base = OTHER; note = 2'-O-methyladenosine-3'-phosphate
  modified_base 9: mod_base = OTHER; note = 2'-O-methylcytidine-3'-phosphate
  modified_base 10: mod_base = OTHER; note = 2'-O-methylguanosine-3'-phosphate
  modified_base 11: mod_base = OTHER; note = 2'-O-methylguanosine-3'-phosphate
  modified_base 13: mod_base = OTHER; note = 2'-O-methyladenosine-3'-phosphate
  modified_base 14: mod_base = OTHER; note = 2'-fluoroguanosine-3'-phosphate
  modified_base 15: mod_base = OTHER; note = 2'-O-methyladenosine-3'-phosphate
  modified_base 16: mod_base = OTHER; note = 2'-O-methyladenosine-3'-phosphate
  modified_base 17: mod_base = OTHER; note = 2'-O-methyluridine-3'-phosphate
  modified_base 18: mod_base = OTHER; note = 2'-O-methylguanosine-3'-phosphate
  modified_base 19: mod_base = OTHER; note = 2'-O-methylguanosine-3'-phosphate
  modified_base 20: mod_base = OTHER; note = 2'-O-methyladenosine-3'-phosphate
  modified_base 21: mod_base = OTHER; note = 2'-O-methyladenosine-3'-phosphorothioate
  modified_base 22: mod_base = OTHER; note = 2'-O-methylcytidine-3'-phosphorothioate
  modified_base 23: mod_base = OTHER; note = 2'-O-methyluridine-3'-phosphate
  misc_feature 1: note = RNA
  misc_feature 2: note = DNA
  misc_feature 3..4: note = RNA
  misc_feature 5: note = DNA
  misc_feature 6: note = RNA
  misc_feature 7: note = DNA
  misc_feature 8..11: note = RNA
  misc_feature 12: note = DNA
  misc_feature 13..23: note = RNA
actgaagacggcagaatggaact

SEQ ID NO: 7924 - DNA, 23 bp, synthetic construct
  source 1..23: mol_type = other DNA
  modified_base 1: mod_base = OTHER; note = 2'-O-methyladenosine-3'-phosphorothioate
  modified_base 2: mod_base = OTHER; note = 2'-deoxyadenosine-3'-phosphorothioate
  modified_base 3: mod_base = OTHER; note = 2'-O-methyladenosine-3'-phosphate
  modified_base 4: mod_base = OTHER; note = 2'-O-methylguanosine-3'-phosphate
  modified_base 6: mod_base = OTHER; note = 2'-O-methyladenosine-3'-phosphate
  modified_base 8: mod_base = OTHER; note = 2'-O-methyluridine-3'-phosphate
  modified_base 9: mod_base = OTHER; note = 2'-O-methylguanosine-3'-phosphate
  modified_base 10: mod_base = OTHER; note = 2'-O-methyluridine-3'-phosphate
  modified_base 11: mod_base = OTHER; note = 2'-O-methyluridine-3'-phosphate
  modified_base 13: mod_base = OTHER; note = 2'-O-methylguanosine-3'-phosphate
  modified_base 14: mod_base = OTHER; note = 2'-fluorocytidine-3'-phosphate
  modified_base 15: mod_base = OTHER; note = 2'-O-methyluridine-3'-phosphate
  modified_base 16: mod_base = OTHER; note = 2'-O-methyluridine-3'-phosphate
  modified_base 17: mod_base = OTHER; note = 2'-O-methyluridine-3'-phosphate
  modified_base 18: mod_base = OTHER; note = 2'-O-methylguanosine-3'-phosphate
  modified_base 19: mod_base = OTHER; note = 2'-O-methyladenosine-3'-phosphate
  modified_base 20: mod_base = OTHER; note = 2'-O-methylguanosine-3'-phosphate
  modified_base 21: mod_base = OTHER; note = 2'-O-methylguanosine-3'-phosphorothioate
  modified_base 22: mod_base = OTHER; note = 2'-O-methylcytidine-3'-phosphorothioate
  modified_base 23: mod_base = OTHER; note = 2'-O-methyluridine-3'-phosphate
  misc_feature 1: note = RNA
  misc_feature 2: note = DNA
  misc_feature 3..4: note = RNA
  misc_feature 5: note = DNA
  misc_feature 6: note = RNA
  misc_feature 7: note = DNA
  misc_feature 8..11: note = RNA
  misc_feature 12: note = DNA
  misc_feature 13..23: note = RNA
aaaggattgttggctttgaggct

SEQ ID NO: 7925 - DNA, 23 bp, synthetic construct
  source 1..23: mol_type = other DNA
  modified_base 1: mod_base = OTHER; note = 2'-O-methyladenosine-3'-phosphorothioate
  modified_base 2: mod_base = OTHER; note = 2'-deoxycytidine-3'-phosphorothioate
  modified_base 3: mod_base = OTHER; note = 2'-O-methyladenosine-3'-phosphate
  modified_base 4: mod_base = OTHER; note = 2'-O-methyladenosine-3'-phosphate
  modified_base 6: mod_base = OTHER; note = 2'-O-methylguanosine-3'-phosphate
  modified_base 8: mod_base = OTHER; note = 2'-O-methyluridine-3'-phosphate
  modified_base 9: mod_base = OTHER; note = 2'-O-methyluridine-3'-phosphate
  modified_base 10: mod_base = OTHER; note = 2'-O-methylguanosine-3'-phosphate
  modified_base 11: mod_base = OTHER; note = 2'-O-methyluridine-3'-phosphate
  modified_base 13: mod_base = OTHER; note = 2'-O-methylguanosine-3'-phosphate
  modified_base 14: mod_base = OTHER; note = 2'-fluoroguanosine-3'-phosphate
  modified_base 15: mod_base = OTHER; note = 2'-O-methylcytidine-3'-phosphate
  modified_base 16: mod_base = OTHER; note = 2'-O-methyluridine-3'-phosphate
  modified_base 17: mod_base = OTHER; note = 2'-O-methyluridine-3'-phosphate
  modified_base 18: mod_base = OTHER; note = 2'-O-methyluridine-3'-phosphate
  modified_base 19: mod_base = OTHER; note = 2'-O-methylguanosine-3'-phosphate
  modified_base 20: mod_base = OTHER; note = 2'-O-methyladenosine-3'-phosphate
  modified_base 21: mod_base = OTHER; note = 2'-O-methylguanosine-3'-phosphorothioate
  modified_base 22: mod_base = OTHER; note = 2'-O-methylcytidine-3'-phosphorothioate
  modified_base 23: mod_base = OTHER; note = 2'-O-methyluridine-3'-phosphate
  misc_feature 1: note = RNA
  misc_feature 2: note = DNA
  misc_feature 3..4: note = RNA
  misc_feature 5: note = DNA
  misc_feature 6: note = RNA
  misc_feature 7: note = DNA
  misc_feature 8..11: note = RNA
  misc_feature 12: note = DNA
  misc_feature 13..23: note = RNA
acaaggattgttggctttgagct

SEQ ID NO: 7926 - DNA, 23 bp, synthetic construct
  source 1..23: mol_type = other DNA
  modified_base 1: mod_base = OTHER; note = 2'-O-methyladenosine-3'-phosphorothioate
  modified_base 2: mod_base = OTHER; note = 2'-deoxycytidine-3'-phosphorothioate
  modified_base 3: mod_base = OTHER; note = 2'-O-methyluridine-3'-phosphate
  modified_base 4: mod_base = OTHER; note = 2'-O-methyluridine-3'-phosphate
  modified_base 6: mod_base = OTHER; note = 2'-O-methylguanosine-3'-phosphate
  modified_base 8: mod_base = OTHER; note = 2'-O-methylguanosine-3'-phosphate
  modified_base 9: mod_base = OTHER; note = 2'-O-methylcytidine-3'-phosphate
  modified_base 10: mod_base = OTHER; note = 2'-O-methyladenosine-3'-phosphate
  modified_base 11: mod_base = OTHER; note = 2'-O-methylguanosine-3'-phosphate
  modified_base 13: mod_base = OTHER; note = 2'-O-methyladenosine-3'-phosphate
  modified_base 14: mod_base = OTHER; note = 2'-fluoroguanosine-3'-phosphate
  modified_base 15: mod_base = OTHER; note = 2'-O-methylguanosine-3'-phosphate
  modified_base 16: mod_base = OTHER; note = 2'-O-methylguanosine-3'-phosphate
  modified_base 17: mod_base = OTHER; note = 2'-O-methyladenosine-3'-phosphate
  modified_base 18: mod_base = OTHER; note = 2'-O-methylcytidine-3'-phosphate
  modified_base 19: mod_base = OTHER; note = 2'-O-methyladenosine-3'-phosphate
  modified_base 20: mod_base = OTHER; note = 2'-O-methylcytidine-3'-phosphate
  modified_base 21: mod_base = OTHER; note = 2'-O-methyladenosine-3'-phosphorothioate
  modified_base 22: mod_base = OTHER; note = 2'-O-methylcytidine-3'-phosphorothioate
  modified_base 23: mod_base = OTHER; note = 2'-O-methyluridine-3'-phosphate
  misc_feature 1: note = RNA
  misc_feature 2: note = DNA
  misc_feature 3..4: note = RNA
  misc_feature 5: note = DNA
  misc_feature 6: note = RNA
  misc_feature 7: note = DNA
  misc_feature 8..11: note = RNA
  misc_feature 12: note = DNA
  misc_feature 13..23: note = RNA
acttcgggcagtagggacacact

SEQ ID NO: 7927 - DNA, 23 bp, synthetic construct
  source 1..23: mol_type = other DNA
  modified_base 1: mod_base = OTHER; note = 2'-O-methyladenosine-3'-phosphorothioate
  modified_base 2: mod_base = OTHER; note = 2'-deoxycytidine-3'-phosphorothioate
  modified_base 3: mod_base = OTHER; note = 2'-O-methylcytidine-3'-phosphate
  modified_base 4: mod_base = OTHER; note = 2'-O-methyluridine-3'-phosphate
  modified_base 6: mod_base = OTHER; note = 2'-O-methylcytidine-3'-phosphate
  modified_base 8: mod_base = OTHER; note = 2'-O-methylguanosine-3'-phosphate
  modified_base 9: mod_base = OTHER; note = 2'-O-methylguanosine-3'-phosphate
  modified_base 10: mod_base = OTHER; note = 2'-O-methylcytidine-3'-phosphate
  modified_base 11: mod_base = OTHER; note = 2'-O-methyladenosine-3'-phosphate
  modified_base 13: mod_base = OTHER; note = 2'-O-methyluridine-3'-phosphate
  modified_base 14: mod_base = OTHER; note = 2'-fluoroadenosine-3'-phosphate
  modified_base 15: mod_base = OTHER; note = 2'-O-methylguanosine-3'-phosphate
  modified_base 16: mod_base = OTHER; note = 2'-O-methylguanosine-3'-phosphate
  modified_base 17: mod_base = OTHER; note = 2'-O-methylguanosine-3'-phosphate
  modified_base 18: mod_base = OTHER; note = 2'-O-methyladenosine-3'-phosphate
  modified_base 19: mod_base = OTHER; note = 2'-O-methylcytidine-3'-phosphate
  modified_base 20: mod_base = OTHER; note = 2'-O-methyladenosine-3'-phosphate
  modified_base 21: mod_base = OTHER; note = 2'-O-methylcytidine-3'-phosphorothioate
  modified_base 22: mod_base = OTHER; note = 2'-O-methylcytidine-3'-phosphorothioate
  modified_base 23: mod_base = OTHER; note = 2'-O-methyluridine-3'-phosphate
  misc_feature 1: note = RNA
  misc_feature 2: note = DNA
  misc_feature 3..4: note = RNA
  misc_feature 5: note = DNA
  misc_feature 6: note = RNA
  misc_feature 7: note = DNA
  misc_feature 8..11: note = RNA
  misc_feature 12: note = DNA
  misc_feature 13..23: note = RNA
accttcgggcagtagggacacct

SEQ ID NO: 7928 - DNA, 23 bp, synthetic construct
  source 1..23: mol_type = other DNA
  modified_base 1: mod_base = OTHER; note = 2'-O-methyladenosine-3'-phosphorothioate
  modified_base 2: mod_base = OTHER; note = 2'-deoxycytidine-3'-phosphorothioate
  modified_base 3: mod_base = OTHER; note = 2'-O-methyladenosine-3'-phosphate
  modified_base 4: mod_base = OTHER; note = 2'-O-methyluridine-3'-phosphate
  modified_base 6: mod_base = OTHER; note = 2'-O-methyladenosine-3'-phosphate
  modified_base 8: mod_base = OTHER; note = 2'-O-methylguanosine-3'-phosphate
  modified_base 9: mod_base = OTHER; note = 2'-O-methyladenosine-3'-phosphate
  modified_base 10: mod_base = OTHER; note = 2'-O-methyluridine-3'-phosphate
  modified_base 11: mod_base = OTHER; note = 2'-O-methylcytidine-3'-phosphate
  modified_base 13: mod_base = OTHER; note = 2'-O-methyladenosine-3'-phosphate
  modified_base 14: mod_base = OTHER; note = 2'-fluoroguanosine-3'-phosphate
  modified_base 15: mod_base = OTHER; note = 2'-O-methylguanosine-3'-phosphate
  modified_base 16: mod_base = OTHER; note = 2'-O-methyluridine-3'-phosphate
  modified_base 17: mod_base = OTHER; note = 2'-O-methyladenosine-3'-phosphate
  modified_base 18: mod_base = OTHER; note = 2'-O-methylguanosine-3'-phosphate
  modified_base 19: mod_base = OTHER; note = 2'-O-methyladenosine-3'-phosphate
  modified_base 20: mod_base = OTHER; note = 2'-O-methylguanosine-3'-phosphate
  modified_base 21: mod_base = OTHER; note = 2'-O-methylguanosine-3'-phosphorothioate
  modified_base 22: mod_base = OTHER; note = 2'-O-methylcytidine-3'-phosphorothioate
  modified_base 23: mod_base = OTHER; note = 2'-O-methyluridine-3'-phosphate
  misc_feature 1: note = RNA
  misc_feature 2: note = DNA
  misc_feature 3..4: note = RNA
  misc_feature 5: note = DNA
  misc_feature 6: note = RNA
  misc_feature 7: note = DNA
  misc_feature 8..11: note = RNA
  misc_feature 12: note = DNA
  misc_feature 13..23: note = RNA
acattatgatccaggtagaggct

SEQ ID NO: 7929 - DNA, 23 bp, synthetic construct
  source 1..23: mol_type = other DNA
  modified_base 1: mod_base = OTHER; note = 2'-O-methyladenosine-3'-phosphorothioate
  modified_base 2: mod_base = OTHER; note = 2'-deoxycytidine-3'-phosphorothioate
  modified_base 3: mod_base = OTHER; note = 2'-O-methylcytidine-3'-phosphate
  modified_base 4: mod_base = OTHER; note = 2'-O-methyladenosine-3'-phosphate
  modified_base 6: mod_base = OTHER; note = 2'-O-methyluridine-3'-phosphate
  modified_base 8: mod_base = OTHER; note = 2'-O-methyluridine-3'-phosphate
  modified_base 9: mod_base = OTHER; note = 2'-O-methylguanosine-3'-phosphate
  modified_base 10: mod_base = OTHER; note = 2'-O-methyladenosine-3'-phosphate
  modified_base 11: mod_base = OTHER; note = 2'-O-methyluridine-3'-phosphate
  modified_base 13: mod_base = OTHER; note = 2'-O-methylcytidine-3'-phosphate
  modified_base 14: mod_base = OTHER; note = 2'-fluoroadenosine-3'-phosphate
  modified_base 15: mod_base = OTHER; note = 2'-O-methylguanosine-3'-phosphate
  modified_base 16: mod_base = OTHER; note = 2'-O-methylguanosine-3'-phosphate
  modified_base 17: mod_base = OTHER; note = 2'-O-methyluridine-3'-phosphate
  modified_base 18: mod_base = OTHER; note = 2'-O-methyladenosine-3'-phosphate
  modified_base 19: mod_base = OTHER; note = 2'-O-methylguanosine-3'-phosphate
  modified_base 20: mod_base = OTHER; note = 2'-O-methyladenosine-3'-phosphate
  modified_base 21: mod_base = OTHER; note = 2'-O-methylguanosine-3'-phosphorothioate
  modified_base 22: mod_base = OTHER; note = 2'-O-methylcytidine-3'-phosphorothioate
  modified_base 23: mod_base = OTHER; note = 2'-O-methyluridine-3'-phosphate
  misc_feature 1: note = RNA
  misc_feature 2: note = DNA
  misc_feature 3..4: note = RNA
  misc_feature 5: note = DNA
  misc_feature 6: note = RNA
  misc_feature 7: note = DNA
  misc_feature 8..11: note = RNA
  misc_feature 12: note = DNA
  misc_feature 13..23: note = RNA
accattatgatccaggtagagct

SEQ ID NO: 7930 - DNA, 23 bp, synthetic construct
  source 1..23: mol_type = other DNA
  modified_base 1: mod_base = OTHER; note = 2'-O-methyladenosine-3'-phosphorothioate
  modified_base 2: mod_base = OTHER; note = 2'-deoxycytidine-3'-phosphorothioate
  modified_base 3: mod_base = OTHER; note = 2'-O-methylcytidine-3'-phosphate
  modified_base 4: mod_base = OTHER; note = 2'-O-methyladenosine-3'-phosphate
  modified_base 6: mod_base = OTHER; note = 2'-O-methyladenosine-3'-phosphate
  modified_base 8: mod_base = OTHER; note = 2'-O-methyluridine-3'-phosphate
  modified_base 9: mod_base = OTHER; note = 2'-O-methylguanosine-3'-phosphate
  modified_base 10: mod_base = OTHER; note = 2'-O-methylcytidine-3'-phosphate
  modified_base 11: mod_base = OTHER; note = 2'-O-methylcytidine-3'-phosphate
  modified_base 13: mod_base = OTHER; note = 2'-O-methyluridine-3'-phosphate
  modified_base 14: mod_base = OTHER; note = 2'-fluorouridine-3'-phosphate
  modified_base 15: mod_base = OTHER; note = 2'-O-methyladenosine-3'-phosphate
  modified_base 16: mod_base = OTHER; note = 2'-O-methyluridine-3'-phosphate
  modified_base 17: mod_base = OTHER; note = 2'-O-methylguanosine-3'-phosphate
  modified_base 18: mod_base = OTHER; note = 2'-O-methyladenosine-3'-phosphate
  modified_base 19: mod_base = OTHER; note = 2'-O-methyluridine-3'-phosphate
  modified_base 20: mod_base = OTHER; note = 2'-O-methylcytidine-3'-phosphate
  modified_base 21: mod_base = OTHER; note = 2'-O-methylcytidine-3'-phosphorothioate
  modified_base 22: mod_base = OTHER; note = 2'-O-methylcytidine-3'-phosphorothioate
  modified_base 23: mod_base = OTHER; note = 2'-O-methyluridine-3'-phosphate
  misc_feature 1: note = RNA
  misc_feature 2: note = DNA
  misc_feature 3..4: note = RNA
  misc_feature 5: note = DNA
  misc_feature 6: note = RNA
  misc_feature 7: note = DNA
  misc_feature 8..11: note = RNA
  misc_feature 12: note = DNA
  misc_feature 13..23: note = RNA
accacattgccattatgatccct

SEQ ID NO: 7931 - DNA, 23 bp, synthetic construct
  source 1..23: mol_type = other DNA
  modified_base 1: mod_base = OTHER; note = 2'-O-methyladenosine-3'-phosphorothioate
  modified_base 2: mod_base = OTHER; note = 2'-deoxyadenosine-3'-phosphorothioate
  modified_base 3: mod_base = OTHER; note = 2'-O-methylcytidine-3'-phosphate
  modified_base 4: mod_base = OTHER; note = 2'-O-methylcytidine-3'-phosphate
  modified_base 6: mod_base = OTHER; note = 2'-O-methylcytidine-3'-phosphate
  modified_base 8: mod_base = OTHER; note = 2'-O-methyluridine-3'-phosphate
  modified_base 9: mod_base = OTHER; note = 2'-O-methyluridine-3'-phosphate
  modified_base 10: mod_base = OTHER; note = 2'-O-methylguanosine-3'-phosphate
  modified_base 11: mod_base = OTHER; note = 2'-O-methylcytidine-3'-phosphate
  modified_base 13: mod_base = OTHER; note = 2'-O-methyladenosine-3'-phosphate
  modified_base 14: mod_base = OTHER; note = 2'-fluorouridine-3'-phosphate
  modified_base 15: mod_base = OTHER; note = 2'-O-methyluridine-3'-phosphate
  modified_base 16: mod_base = OTHER; note = 2'-O-methyladenosine-3'-phosphate
  modified_base 17: mod_base = OTHER; note = 2'-O-methyluridine-3'-phosphate
  modified_base 18: mod_base = OTHER; note = 2'-O-methylguanosine-3'-phosphate
  modified_base 19: mod_base = OTHER; note = 2'-O-methyladenosine-3'-phosphate
  modified_base 20: mod_base = OTHER; note = 2'-O-methyluridine-3'-phosphate
  modified_base 21: mod_base = OTHER; note = 2'-O-methylcytidine-3'-phosphorothioate
  modified_base 22: mod_base = OTHER; note = 2'-O-methylcytidine-3'-phosphorothioate
  modified_base 23: mod_base = OTHER; note = 2'-O-methyluridine-3'-phosphate
  misc_feature 1: note = RNA
  misc_feature 2: note = DNA
  misc_feature 3..4: note = RNA
  misc_feature 5: note = DNA
  misc_feature 6: note = RNA
  misc_feature 7: note = DNA
  misc_feature 8..11: note = RNA
  misc_feature 12: note = DNA
  misc_feature 13..23: note = RNA
aaccacattgccattatgatcct

SEQ ID NO: 7932 - DNA, 23 bp, synthetic construct
  source 1..23: mol_type = other DNA
  modified_base 1: mod_base = OTHER; note = 2'-O-methyladenosine-3'-phosphorothioate
  modified_base 2: mod_base = OTHER; note = 2'-deoxycytidine-3'-phosphorothioate
  modified_base 3: mod_base = OTHER; note = 2'-O-methylguanosine-3'-phosphate
  modified_base 4: mod_base = OTHER; note = 2'-O-methyluridine-3'-phosphate
  modified_base 6: mod_base = OTHER; note = 2'-O-methyluridine-3'-phosphate
  modified_base 8: mod_base = OTHER; note = 2'-O-methylguanosine-3'-phosphate
  modified_base 9: mod_base = OTHER; note = 2'-O-methyladenosine-3'-phosphate
  modified_base 10: mod_base = OTHER; note = 2'-O-methylcytidine-3'-phosphate
  modified_base 11: mod_base = OTHER; note = 2'-O-methylcytidine-3'-phosphate
  modified_base 13: mod_base = OTHER; note = 2'-O-methylcytidine-3'-phosphate
  modified_base 14: mod_base = OTHER; note = 2'-fluoroadenosine-3'-phosphate
  modified_base 15: mod_base = OTHER; note = 2'-O-methyluridine-3'-phosphate
  modified_base 16: mod_base = OTHER; note = 2'-O-methyluridine-3'-phosphate
  modified_base 17: mod_base = OTHER; note = 2'-O-methylguanosine-3'-phosphate
  modified_base 18: mod_base = OTHER; note = 2'-O-methylcytidine-3'-phosphate
  modified_base 19: mod_base = OTHER; note = 2'-O-methylcytidine-3'-phosphate
  modified_base 20: mod_base = OTHER; note = 2'-O-methyladenosine-3'-phosphate
  modified_base 21: mod_base = OTHER; note = 2'-O-methyluridine-3'-phosphorothioate
  modified_base 22: mod_base = OTHER; note = 2'-O-methylcytidine-3'-phosphorothioate
  modified_base 23: mod_base = OTHER; note = 2'-O-methyluridine-3'-phosphate
  misc_feature 1: note = RNA
  misc_feature 2: note = DNA
  misc_feature 3..4: note = RNA
  misc_feature 5: note = DNA
  misc_feature 6: note = RNA
  misc_feature 7: note = DNA
  misc_feature 8..11: note = RNA
  misc_feature 12: note = DNA
  misc_feature 13..23: note = RNA
acgtcttgaccacattgccatct

SEQ ID NO: 7933 - DNA, 23 bp, synthetic construct
  source 1..23: mol_type = other DNA
  modified_base 1: mod_base = OTHER; note = 2'-O-methyladenosine-3'-phosphorothioate
  modified_base 2: mod_base = OTHER; note = 2'-deoxythimidine-3'-phosphorothioate
  modified_base 3: mod_base = OTHER; note = 2'-O-methylcytidine-3'-phosphate
  modified_base 4: mod_base = OTHER; note = 2'-O-methylcytidine-3'-phosphate
  modified_base 6: mod_base = OTHER; note = 2'-O-methyluridine-3'-phosphate
  modified_base 8: mod_base = OTHER; note = 2'-O-methyluridine-3'-phosphate
  modified_base 9: mod_base = OTHER; note = 2'-O-methyluridine-3'-phosphate
  modified_base 10: mod_base = OTHER; note = 2'-O-methylguanosine-3'-phosphate
  modified_base 11: mod_base = OTHER; note = 2'-O-methyladenosine-3'-phosphate
  modified_base 13: mod_base = OTHER; note = 2'-O-methylcytidine-3'-phosphate
  modified_base 14: mod_base = OTHER; note = 2'-fluoroadenosine-3'-phosphate
  modified_base 15: mod_base = OTHER; note = 2'-O-methylcytidine-3'-phosphate
  modified_base 16: mod_base = OTHER; note = 2'-O-methyladenosine-3'-phosphate
  modified_base 17: mod_base = OTHER; note = 2'-O-methyluridine-3'-phosphate
  modified_base 18: mod_base = OTHER; note = 2'-O-methyluridine-3'-phosphate
  modified_base 19: mod_base = OTHER; note = 2'-O-methylguanosine-3'-phosphate
  modified_base 20: mod_base = OTHER; note = 2'-O-methylcytidine-3'-phosphate
  modified_base 21: mod_base = OTHER; note = 2'-O-methylcytidine-3'-phosphorothioate
  modified_base 22: mod_base = OTHER; note = 2'-O-methylcytidine-3'-phosphorothioate
  modified_base 23: mod_base = OTHER; note = 2'-O-methyluridine-3'-phosphate
  misc_feature 1: note = RNA
  misc_feature 2: note = DNA
  misc_feature 3..4: note = RNA
  misc_feature 5: note = DNA
  misc_feature 6: note = RNA
  misc_feature 7: note = DNA
  misc_feature 8..11: note = RNA
  misc_feature 12: note = DNA
  misc_feature 13..23: note = RNA
atccgtcttgaccacattgccct

SEQ ID NO: 7934 - DNA, 23 bp, synthetic construct
  source 1..23: mol_type = other DNA
  modified_base 1: mod_base = OTHER; note = 2'-O-methyladenosine-3'-phosphorothioate
  modified_base 2: mod_base = OTHER; note = 2'-deoxyadenosine-3'-phosphorothioate
  modified_base 3: mod_base = OTHER; note = 2'-O-methyluridine-3'-phosphate
  modified_base 4: mod_base = OTHER; note = 2'-O-methylcytidine-3'-phosphate
  modified_base 6: mod_base = OTHER; note = 2'-O-methylguanosine-3'-phosphate
  modified_base 8: mod_base = OTHER; note = 2'-O-methylcytidine-3'-phosphate
  modified_base 9: mod_base = OTHER; note = 2'-O-methyluridine-3'-phosphate
  modified_base 10: mod_base = OTHER; note = 2'-O-methyluridine-3'-phosphate
  modified_base 11: mod_base = OTHER; note = 2'-O-methylguanosine-3'-phosphate
  modified_base 13: mod_base = OTHER; note = 2'-O-methylcytidine-3'-phosphate
  modified_base 14: mod_base = OTHER; note = 2'-fluorocytidine-3'-phosphate
  modified_base 15: mod_base = OTHER; note = 2'-O-methyladenosine-3'-phosphate
  modified_base 16: mod_base = OTHER; note = 2'-O-methylcytidine-3'-phosphate
  modified_base 17: mod_base = OTHER; note = 2'-O-methyladenosine-3'-phosphate
  modified_base 18: mod_base = OTHER; note = 2'-O-methyluridine-3'-phosphate
  modified_base 19: mod_base = OTHER; note = 2'-O-methyluridine-3'-phosphate
  modified_base 20: mod_base = OTHER; note = 2'-O-methylguanosine-3'-phosphate
  modified_base 21: mod_base = OTHER; note = 2'-O-methylcytidine-3'-phosphorothioate
  modified_base 22: mod_base = OTHER; note = 2'-O-methylcytidine-3'-phosphorothioate
  modified_base 23: mod_base = OTHER; note = 2'-O-methyluridine-3'-phosphate
  misc_feature 1: note = RNA
  misc_feature 2: note = DNA
  misc_feature 3..4: note = RNA
  misc_feature 5: note = DNA
  misc_feature 6: note = RNA
  misc_feature 7: note = DNA
  misc_feature 8..11: note = RNA
  misc_feature 12: note = DNA
  misc_feature 13..23: note = RNA
aatccgtcttgaccacattgcct

SEQ ID NO: 7935 - DNA, 23 bp, synthetic construct
  source 1..23: mol_type = other DNA
  modified_base 1: mod_base = OTHER; note = 2'-O-methyladenosine-3'-phosphorothioate
  modified_base 2: mod_base = OTHER; note = 2'-deoxycytidine-3'-phosphorothioate
  modified_base 3: mod_base = OTHER; note = 2'-O-methyluridine-3'-phosphate
  modified_base 4: mod_base = OTHER; note = 2'-O-methylcytidine-3'-phosphate
  modified_base 6: mod_base = OTHER; note = 2'-O-methyladenosine-3'-phosphate
  modified_base 8: mod_base = OTHER; note = 2'-O-methylcytidine-3'-phosphate
  modified_base 9: mod_base = OTHER; note = 2'-O-methyladenosine-3'-phosphate
  modified_base 10: mod_base = OTHER; note = 2'-O-methylcytidine-3'-phosphate
  modified_base 11: mod_base = OTHER; note = 2'-O-methylcytidine-3'-phosphate
  modified_base 13: mod_base = OTHER; note = 2'-O-methyluridine-3'-phosphate
  modified_base 14: mod_base = OTHER; note = 2'-fluoroadenosine-3'-phosphate
  modified_base 15: mod_base = OTHER; note = 2'-O-methyluridine-3'-phosphate
  modified_base 16: mod_base = OTHER; note = 2'-O-methylcytidine-3'-phosphate
  modified_base 17: mod_base = OTHER; note = 2'-O-methyluridine-3'-phosphate
  modified_base 18: mod_base = OTHER; note = 2'-O-methylguanosine-3'-phosphate
  modified_base 19: mod_base = OTHER; note = 2'-O-methylguanosine-3'-phosphate
  modified_base 20: mod_base = OTHER; note = 2'-O-methylcytidine-3'-phosphate
  modified_base 21: mod_base = OTHER; note = 2'-O-methyladenosine-3'-phosphorothioate
  modified_base 22: mod_base = OTHER; note = 2'-O-methylcytidine-3'-phosphorothioate
  modified_base 23: mod_base = OTHER; note = 2'-O-methyluridine-3'-phosphate
  misc_feature 1: note = RNA
  misc_feature 2: note = DNA
  misc_feature 3..4: note = RNA
  misc_feature 5: note = DNA
  misc_feature 6: note = RNA
  misc_feature 7: note = DNA
  misc_feature 8..11: note = RNA
  misc_feature 12: note = DNA
  misc_feature 13..23: note = RNA
actccaccaccatatctggcact

SEQ ID NO: 7936 - DNA, 23 bp, synthetic construct
  source 1..23: mol_type = other DNA
  modified_base 1: mod_base = OTHER; note = 2'-O-methyladenosine-3'-phosphorothioate
  modified_base 2: mod_base = OTHER; note = 2'-deoxycytidine-3'-phosphorothioate
  modified_base 3: mod_base = OTHER; note = 2'-O-methylcytidine-3'-phosphate
  modified_base 4: mod_base = OTHER; note = 2'-O-methyluridine-3'-phosphate
  modified_base 6: mod_base = OTHER; note = 2'-O-methyluridine-3'-phosphate
  modified_base 8: mod_base = OTHER; note = 2'-O-methylguanosine-3'-phosphate
  modified_base 9: mod_base = OTHER; note = 2'-O-methylcytidine-3'-phosphate
  modified_base 10: mod_base = OTHER; note = 2'-O-methyluridine-3'-phosphate
  modified_base 11: mod_base = OTHER; note = 2'-O-methyladenosine-3'-phosphate
  modified_base 13: mod_base = OTHER; note = 2'-O-methylcytidine-3'-phosphate
  modified_base 14: mod_base = OTHER; note = 2'-fluorouridine-3'-phosphate
  modified_base 15: mod_base = OTHER; note = 2'-O-methylguanosine-3'-phosphate
  modified_base 16: mod_base = OTHER; note = 2'-O-methylcytidine-3'-phosphate
  modified_base 17: mod_base = OTHER; note = 2'-O-methyladenosine-3'-phosphate
  modified_base 18: mod_base = OTHER; note = 2'-O-methylguanosine-3'-phosphate
  modified_base 19: mod_base = OTHER; note = 2'-O-methylcytidine-3'-phosphate
  modified_base 20: mod_base = OTHER; note = 2'-O-methylcytidine-3'-phosphate
  modified_base 21: mod_base = OTHER; note = 2'-O-methyladenosine-3'-phosphorothioate
  modified_base 22: mod_base = OTHER; note = 2'-O-methylcytidine-3'-phosphorothioate
  modified_base 23: mod_base = OTHER; note = 2'-O-methyluridine-3'-phosphate
  misc_feature 1: note = RNA
  misc_feature 2: note = DNA
  misc_feature 3..4: note = RNA
  misc_feature 5: note = DNA
  misc_feature 6: note = RNA
  misc_feature 7: note = DNA
  misc_feature 8..11: note = RNA
  misc_feature 12: note = DNA
  misc_feature 13..23: note = RNA
acctcttgctagctgcagccact

SEQ ID NO: 7937 - DNA, 23 bp, synthetic construct
  source 1..23: mol_type = other DNA
  modified_base 1: mod_base = OTHER; note = 2'-O-methyladenosine-3'-phosphorothioate
  modified_base 2: mod_base = OTHER; note = 2'-deoxycytidine-3'-phosphorothioate
  modified_base 3: mod_base = OTHER; note = 2'-O-methyladenosine-3'-phosphate
  modified_base 4: mod_base = OTHER; note = 2'-O-methyluridine-3'-phosphate
  modified_base 6: mod_base = OTHER; note = 2'-O-methyluridine-3'-phosphate
  modified_base 8: mod_base = OTHER; note = 2'-O-methylguanosine-3'-phosphate
  modified_base 9: mod_base = OTHER; note = 2'-O-methylguanosine-3'-phosphate
  modified_base 10: mod_base = OTHER; note = 2'-O-methyluridine-3'-phosphate
  modified_base 11: mod_base = OTHER; note = 2'-O-methylcytidine-3'-phosphate
  modified_base 13: mod_base = OTHER; note = 2'-O-methylcytidine-3'-phosphate
  modified_base 14: mod_base = OTHER; note = 2'-fluorouridine-3'-phosphate
  modified_base 15: mod_base = OTHER; note = 2'-O-methyluridine-3'-phosphate
  modified_base 16: mod_base = OTHER; note = 2'-O-methylcytidine-3'-phosphate
  modified_base 17: mod_base = OTHER; note = 2'-O-methyladenosine-3'-phosphate
  modified_base 18: mod_base = OTHER; note = 2'-O-methylcytidine-3'-phosphate
  modified_base 19: mod_base = OTHER; note = 2'-O-methyluridine-3'-phosphate
  modified_base 20: mod_base = OTHER; note = 2'-O-methylcytidine-3'-phosphate
  modified_base 21: mod_base = OTHER; note = 2'-O-methylcytidine-3'-phosphorothioate
  modified_base 22: mod_base = OTHER; note = 2'-O-methylcytidine-3'-phosphorothioate
  modified_base 23: mod_base = OTHER; note = 2'-O-methyluridine-3'-phosphate
  misc_feature 1: note = RNA
  misc_feature 2: note = DNA
  misc_feature 3..4: note = RNA
  misc_feature 5: note = DNA
  misc_feature 6: note = RNA
  misc_feature 7: note = DNA
  misc_feature 8..11: note = RNA
  misc_feature 12: note = DNA
  misc_feature 13..23: note = RNA
acatcttggtctcttcactccct

SEQ ID NO: 7938 - DNA, 23 bp, synthetic construct
  source 1..23: mol_type = other DNA
  modified_base 1: mod_base = OTHER; note = 2'-O-methyladenosine-3'-phosphorothioate
  modified_base 2: mod_base = OTHER; note = 2'-deoxyadenosine-3'-phosphorothioate
  modified_base 3: mod_base = OTHER; note = 2'-O-methyladenosine-3'-phosphate
  modified_base 4: mod_base = OTHER; note = 2'-O-methyladenosine-3'-phosphate
  modified_base 6: mod_base = OTHER; note = 2'-O-methyluridine-3'-phosphate
  modified_base 8: mod_base = OTHER; note = 2'-O-methylcytidine-3'-phosphate
  modified_base 9: mod_base = OTHER; note = 2'-O-methyladenosine-3'-phosphate
  modified_base 10: mod_base = OTHER; note = 2'-O-methyluridine-3'-phosphate
  modified_base 11: mod_base = OTHER; note = 2'-O-methylcytidine-3'-phosphate
  modified_base 13: mod_base = OTHER; note = 2'-O-methyluridine-3'-phosphate
  modified_base 14: mod_base = OTHER; note = 2'-fluoroguanosine-3'-phosphate
  modified_base 15: mod_base = OTHER; note = 2'-O-methylguanosine-3'-phosphate
  modified_base 16: mod_base = OTHER; note = 2'-O-methyluridine-3'-phosphate
  modified_base 17: mod_base = OTHER; note = 2'-O-methylcytidine-3'-phosphate
  modified_base 18: mod_base = OTHER; note = 2'-O-methyluridine-3'-phosphate
  modified_base 19: mod_base = OTHER; note = 2'-O-methylcytidine-3'-phosphate
  modified_base 20: mod_base = OTHER; note = 2'-O-methyluridine-3'-phosphate
  modified_base 21: mod_base = OTHER; note = 2'-O-methyluridine-3'-phosphorothioate
  modified_base 22: mod_base = OTHER; note = 2'-O-methylcytidine-3'-phosphorothioate
  modified_base 23: mod_base = OTHER; note = 2'-O-methyluridine-3'-phosphate
  misc_feature 1: note = RNA
  misc_feature 2: note = DNA
  misc_feature 3..4: note = RNA
  misc_feature 5: note = DNA
  misc_feature 6: note = RNA
  misc_feature 7: note = DNA
  misc_feature 8..11: note = RNA
  misc_feature 12: note = DNA
  misc_feature 13..23: note = RNA
aaaacttcatcttggtctcttct

SEQ ID NO: 7939 - DNA, 23 bp, synthetic construct
  source 1..23: mol_type = other DNA
  modified_base 1: mod_base = OTHER; note = 2'-O-methyladenosine-3'-phosphorothioate
  modified_base 2: mod_base = OTHER; note = 2'-deoxyadenosine-3'-phosphorothioate
  modified_base 3: mod_base = OTHER; note = 2'-O-methylcytidine-3'-phosphate
  modified_base 4: mod_base = OTHER; note = 2'-O-methyladenosine-3'-phosphate
  modified_base 6: mod_base = OTHER; note = 2'-O-methyladenosine-3'-phosphate
  modified_base 8: mod_base = OTHER; note = 2'-O-methylcytidine-3'-phosphate
  modified_base 9: mod_base = OTHER; note = 2'-O-methyladenosine-3'-phosphate
  modified_base 10: mod_base = OTHER; note = 2'-O-methylguanosine-3'-phosphate
  modified_base 11: mod_base = OTHER; note = 2'-O-methylcytidine-3'-phosphate
  modified_base 13: mod_base = OTHER; note = 2'-O-methyladenosine-3'-phosphate
  modified_base 14: mod_base = OTHER; note = 2'-fluoroadenosine-3'-phosphate
  modified_base 15: mod_base = OTHER; note = 2'-O-methylcytidine-3'-phosphate
  modified_base 16: mod_base = OTHER; note = 2'-O-methylcytidine-3'-phosphate
  modified_base 17: mod_base = OTHER; note = 2'-O-methyluridine-3'-phosphate
  modified_base 18: mod_base = OTHER; note = 2'-O-methylguanosine-3'-phosphate
  modified_base 19: mod_base = OTHER; note = 2'-O-methylguanosine-3'-phosphate
  modified_base 20: mod_base = OTHER; note = 2'-O-methyladenosine-3'-phosphate
  modified_base 21: mod_base = OTHER; note = 2'-O-methyladenosine-3'-phosphorothioate
  modified_base 22: mod_base = OTHER; note = 2'-O-methylcytidine-3'-phosphorothioate
  modified_base 23: mod_base = OTHER; note = 2'-O-methyluridine-3'-phosphate
  misc_feature 1: note = RNA
  misc_feature 2: note = DNA
  misc_feature 3..4: note = RNA
  misc_feature 5: note = DNA
  misc_feature 6: note = RNA
  misc_feature 7: note = DNA
  misc_feature 8..11: note = RNA
  misc_feature 12: note = DNA
  misc_feature 13..23: note = RNA
aacacatcagccaacctggaact

SEQ ID NO: 7940 - DNA, 23 bp, synthetic construct
  source 1..23: mol_type = other DNA
  modified_base 1: mod_base = OTHER; note = 2'-O-methyladenosine-3'-phosphorothioate
  modified_base 2: mod_base = OTHER; note = 2'-deoxycytidine-3'-phosphorothioate
  modified_base 3: mod_base = OTHER; note = 2'-O-methyladenosine-3'-phosphate
  modified_base 4: mod_base = OTHER; note = 2'-O-methyladenosine-3'-phosphate
  modified_base 6: mod_base = OTHER; note = 2'-O-methyladenosine-3'-phosphate
  modified_base 8: mod_base = OTHER; note = 2'-O-methyladenosine-3'-phosphate
  modified_base 9: mod_base = OTHER; note = 2'-O-methyluridine-3'-phosphate
  modified_base 10: mod_base = OTHER; note = 2'-O-methylcytidine-3'-phosphate
  modified_base 11: mod_base = OTHER; note = 2'-O-methyladenosine-3'-phosphate
  modified_base 13: mod_base = OTHER; note = 2'-O-methylcytidine-3'-phosphate
  modified_base 14: mod_base = OTHER; note = 2'-fluorocytidine-3'-phosphate
  modified_base 15: mod_base = OTHER; note = 2'-O-methyladenosine-3'-phosphate
  modified_base 16: mod_base = OTHER; note = 2'-O-methyladenosine-3'-phosphate
  modified_base 17: mod_base = OTHER; note = 2'-O-methylcytidine-3'-phosphate
  modified_base 18: mod_base = OTHER; note = 2'-O-methylcytidine-3'-phosphate
  modified_base 19: mod_base = OTHER; note = 2'-O-methyluridine-3'-phosphate
  modified_base 20: mod_base = OTHER; note = 2'-O-methylguanosine-3'-phosphate
  modified_base 21: mod_base = OTHER; note = 2'-O-methylguanosine-3'-phosphorothioate
  modified_base 22: mod_base = OTHER; note = 2'-O-methylcytidine-3'-phosphorothioate
  modified_base 23: mod_base = OTHER; note = 2'-O-methyluridine-3'-phosphate
  misc_feature 1: note = RNA
  misc_feature 2: note = DNA
  misc_feature 3..4: note = RNA
  misc_feature 5: note = DNA
  misc_feature 6: note = RNA
  misc_feature 7: note = DNA
  misc_feature 8..11: note = RNA
  misc_feature 12: note = DNA
  misc_feature 13..23: note = RNA
acaacacatcagccaacctggct

SEQ ID NO: 7941 - DNA, 23 bp, synthetic construct
  source 1..23: mol_type = other DNA
  modified_base 1: mod_base = OTHER; note = 2'-O-methyladenosine-3'-phosphorothioate
  modified_base 2: mod_base = OTHER; note = 2'-deoxycytidine-3'-phosphorothioate
  modified_base 3: mod_base = OTHER; note = 2'-O-methylcytidine-3'-phosphate
  modified_base 4: mod_base = OTHER; note = 2'-O-methyladenosine-3'-phosphate
  modified_base 6: mod_base = OTHER; note = 2'-O-methylcytidine-3'-phosphate
  modified_base 8: mod_base = OTHER; note = 2'-O-methylcytidine-3'-phosphate
  modified_base 9: mod_base = OTHER; note = 2'-O-methyladenosine-3'-phosphate
  modified_base 10: mod_base = OTHER; note = 2'-O-methyluridine-3'-phosphate
  modified_base 11: mod_base = OTHER; note = 2'-O-methylcytidine-3'-phosphate
  modified_base 13: mod_base = OTHER; note = 2'-O-methylguanosine-3'-phosphate
  modified_base 14: mod_base = OTHER; note = 2'-fluorocytidine-3'-phosphate
  modified_base 15: mod_base = OTHER; note = 2'-O-methylcytidine-3'-phosphate
  modified_base 16: mod_base = OTHER; note = 2'-O-methyladenosine-3'-phosphate
  modified_base 17: mod_base = OTHER; note = 2'-O-methyladenosine-3'-phosphate
  modified_base 18: mod_base = OTHER; note = 2'-O-methylcytidine-3'-phosphate
  modified_base 19: mod_base = OTHER; note = 2'-O-methylcytidine-3'-phosphate
  modified_base 20: mod_base = OTHER; note = 2'-O-methyluridine-3'-phosphate
  modified_base 21: mod_base = OTHER; note = 2'-O-methylguanosine-3'-phosphorothioate
  modified_base 22: mod_base = OTHER; note = 2'-O-methylcytidine-3'-phosphorothioate
  modified_base 23: mod_base = OTHER; note = 2'-O-methyluridine-3'-phosphate
  misc_feature 1: note = RNA
  misc_feature 2: note = DNA
  misc_feature 3..4: note = RNA
  misc_feature 5: note = DNA
  misc_feature 6: note = RNA
  misc_feature 7: note = DNA
  misc_feature 8..11: note = RNA
  misc_feature 12: note = DNA
  misc_feature 13..23: note = RNA
accaacacatcagccaacctgct

SEQ ID NO: 7942 - DNA, 23 bp, synthetic construct
  source 1..23: mol_type = other DNA
  modified_base 1: mod_base = OTHER; note = 2'-O-methyladenosine-3'-phosphorothioate
  modified_base 2: mod_base = OTHER; note = 2'-deoxycytidine-3'-phosphorothioate
  modified_base 3: mod_base = OTHER; note = 2'-O-methyluridine-3'-phosphate
  modified_base 4: mod_base = OTHER; note = 2'-O-methylguanosine-3'-phosphate
  modified_base 6: mod_base = OTHER; note = 2'-O-methyluridine-3'-phosphate
  modified_base 8: mod_base = OTHER; note = 2'-O-methylcytidine-3'-phosphate
  modified_base 9: mod_base = OTHER; note = 2'-O-methyladenosine-3'-phosphate
  modified_base 10: mod_base = OTHER; note = 2'-O-methyladenosine-3'-phosphate
  modified_base 11: mod_base = OTHER; note = 2'-O-methylguanosine-3'-phosphate
  modified_base 13: mod_base = OTHER; note = 2'-O-methylcytidine-3'-phosphate
  modified_base 14: mod_base = OTHER; note = 2'-fluorouridine-3'-phosphate
  modified_base 15: mod_base = OTHER; note = 2'-O-methylguanosine-3'-phosphate
  modified_base 16: mod_base = OTHER; note = 2'-O-methylcytidine-3'-phosphate
  modified_base 17: mod_base = OTHER; note = 2'-O-methyluridine-3'-phosphate
  modified_base 18: mod_base = OTHER; note = 2'-O-methylguanosine-3'-phosphate
  modified_base 19: mod_base = OTHER; note = 2'-O-methylguanosine-3'-phosphate
  modified_base 20: mod_base = OTHER; note = 2'-O-methyladenosine-3'-phosphate
  modified_base 21: mod_base = OTHER; note = 2'-O-methylcytidine-3'-phosphorothioate
  modified_base 22: mod_base = OTHER; note = 2'-O-methylcytidine-3'-phosphorothioate
  modified_base 23: mod_base = OTHER; note = 2'-O-methyluridine-3'-phosphate
  misc_feature 1: note = RNA
  misc_feature 2: note = DNA
  misc_feature 3..4: note = RNA
  misc_feature 5: note = DNA
  misc_feature 6: note = RNA
  misc_feature 7: note = DNA
  misc_feature 8..11: note = RNA
  misc_feature 12: note = DNA
  misc_feature 13..23: note = RNA
actgcttcaagcctgctggacct

SEQ ID NO: 7943 - DNA, 23 bp, synthetic construct
  source 1..23: mol_type = other DNA
  modified_base 1: mod_base = OTHER; note = 2'-O-methyladenosine-3'-phosphorothioate
  modified_base 2: mod_base = OTHER; note = 2'-deoxyadenosine-3'-phosphorothioate
  modified_base 3: mod_base = OTHER; note = 2'-O-methyladenosine-3'-phosphate
  modified_base 4: mod_base = OTHER; note = 2'-O-methylguanosine-3'-phosphate
  modified_base 6: mod_base = OTHER; note = 2'-O-methyladenosine-3'-phosphate
  modified_base 8: mod_base = OTHER; note = 2'-O-methyladenosine-3'-phosphate
  modified_base 9: mod_base = OTHER; note = 2'-O-methyladenosine-3'-phosphate
  modified_base 10: mod_base = OTHER; note = 2'-O-methyladenosine-3'-phosphate
  modified_base 11: mod_base = OTHER; note = 2'-O-methyluridine-3'-phosphate
  modified_base 13: mod_base = OTHER; note = 2'-O-methylcytidine-3'-phosphate
  modified_base 14: mod_base = OTHER; note = 2'-fluorouridine-3'-phosphate
  modified_base 15: mod_base = OTHER; note = 2'-O-methyluridine-3'-phosphate
  modified_base 16: mod_base = OTHER; note = 2'-O-methylguanosine-3'-phosphate
  modified_base 17: mod_base = OTHER; note = 2'-O-methyluridine-3'-phosphate
  modified_base 18: mod_base = OTHER; note = 2'-O-methylcytidine-3'-phosphate
  modified_base 19: mod_base = OTHER; note = 2'-O-methyluridine-3'-phosphate
  modified_base 20: mod_base = OTHER; note = 2'-O-methylcytidine-3'-phosphate
  modified_base 21: mod_base = OTHER; note = 2'-O-methylcytidine-3'-phosphorothioate
  modified_base 22: mod_base = OTHER; note = 2'-O-methylcytidine-3'-phosphorothioate
  modified_base 23: mod_base = OTHER; note = 2'-O-methyluridine-3'-phosphate
  misc_feature 1: note = RNA
  misc_feature 2: note = DNA
  misc_feature 3..4: note = RNA
  misc_feature 5: note = DNA
  misc_feature 6: note = RNA
  misc_feature 7: note = DNA
  misc_feature 8..11: note = RNA
  misc_feature 12: note = DNA
  misc_feature 13..23: note = RNA
aaagtataaatgcttgtctccct

SEQ ID NO: 7944 - RNA, 23 nt, synthetic construct
  source 1..23: mol_type = other RNA
tagccagacatgagctgtgaggg

SEQ ID NO: 7945 - RNA, 23 nt, synthetic construct
  source 1..23: mol_type = other RNA
agccagacatgagctgtgagggt

SEQ ID NO: 7946 - RNA, 23 nt, synthetic construct
  source 1..23: mol_type = other RNA
ccagacatgagctgtgagggtca

SEQ ID NO: 7947 - RNA, 23 nt, synthetic construct
  source 1..23: mol_type = other RNA
cagacatgagctgtgagggtcaa

SEQ ID NO: 7948 - RNA, 23 nt, synthetic construct
  source 1..23: mol_type = other RNA
agacatgagctgtgagggtcaag

SEQ ID NO: 7949 - RNA, 23 nt, synthetic construct
  source 1..23: mol_type = other RNA
gacatgagctgtgagggtcaagc

SEQ ID NO: 7950 - RNA, 23 nt, synthetic construct
  source 1..23: mol_type = other RNA
acatgagctgtgagggtcaagca

SEQ ID NO: 7951 - RNA, 23 nt, synthetic construct
  source 1..23: mol_type = other RNA
catgagctgtgagggtcaagcac

SEQ ID NO: 7952 - RNA, 23 nt, synthetic construct
  source 1..23: mol_type = other RNA
atgagctgtgagggtcaagcaca

SEQ ID NO: 7953 - RNA, 23 nt, synthetic construct
  source 1..23: mol_type = other RNA
tgagctgtgagggtcaagcacag

SEQ ID NO: 7954 - RNA, 23 nt, synthetic construct
  source 1..23: mol_type = other RNA
gagctgtgagggtcaagcacagc

SEQ ID NO: 7955 - RNA, 23 nt, synthetic construct
  source 1..23: mol_type = other RNA
agctgtgagggtcaagcacagct

SEQ ID NO: 7956 - RNA, 23 nt, synthetic construct
  source 1..23: mol_type = other RNA
gctgtgagggtcaagcacagcta

SEQ ID NO: 7957 - RNA, 23 nt, synthetic construct
  source 1..23: mol_type = other RNA
ctgtgagggtcaagcacagctat

SEQ ID NO: 7958 - RNA, 23 nt, synthetic construct
  source 1..23: mol_type = other RNA
tgtgagggtcaagcacagctatc

SEQ ID NO: 7959 - RNA, 23 nt, synthetic construct
  source 1..23: mol_type = other RNA
gtgagggtcaagcacagctatcc

SEQ ID NO: 7960 - RNA, 23 nt, synthetic construct
  source 1..23: mol_type = other RNA
tgagggtcaagcacagctatcca

SEQ ID NO: 7961 - RNA, 23 nt, synthetic construct
  source 1..23: mol_type = other RNA
gagggtcaagcacagctatccat

SEQ ID NO: 7962 - RNA, 23 nt, synthetic construct
  source 1..23: mol_type = other RNA
gtcaagcacagctatccatcaga

SEQ ID NO: 7963 - RNA, 23 nt, synthetic construct
  source 1..23: mol_type = other RNA
tcaagcacagctatccatcagat

SEQ ID NO: 7964 - RNA, 23 nt, synthetic construct
  source 1..23: mol_type = other RNA
aagcacagctatccatcagatga

SEQ ID NO: 7965 - RNA, 23 nt, synthetic construct
  source 1..23: mol_type = other RNA
agcacagctatccatcagatgat

SEQ ID NO: 7966 - RNA, 23 nt, synthetic construct
  source 1..23: mol_type = other RNA
gcacagctatccatcagatgatc

SEQ ID NO: 7967 - RNA, 23 nt, synthetic construct
  source 1..23: mol_type = other RNA
cacagctatccatcagatgatct

SEQ ID NO: 7968 - RNA, 23 nt, synthetic construct
  source 1..23: mol_type = other RNA
acagctatccatcagatgatcta

SEQ ID NO: 7969 - RNA, 23 nt, synthetic construct
  source 1..23: mol_type = other RNA
cagctatccatcagatgatctac

SEQ ID NO: 7970 - RNA, 23 nt, synthetic construct
  source 1..23: mol_type = other RNA
agctatccatcagatgatctact

SEQ ID NO: 7971 - RNA, 23 nt, synthetic construct
  source 1..23: mol_type = other RNA
gctatccatcagatgatctactt

SEQ ID NO: 7972 - RNA, 23 nt, synthetic construct
  source 1..23: mol_type = other RNA
ctatccatcagatgatctacttt

SEQ ID NO: 7973 - RNA, 23 nt, synthetic construct
  source 1..23: mol_type = other RNA
tatccatcagatgatctactttc

SEQ ID NO: 7974 - RNA, 23 nt, synthetic construct
  source 1..23: mol_type = other RNA
atccatcagatgatctactttca

SEQ ID NO: 7975 - RNA, 23 nt, synthetic construct
  source 1..23: mol_type = other RNA
tccatcagatgatctactttcag

SEQ ID NO: 7976 - RNA, 23 nt, synthetic construct
  source 1..23: mol_type = other RNA
ccatcagatgatctactttcagc

SEQ ID NO: 7977 - RNA, 23 nt, synthetic construct
  source 1..23: mol_type = other RNA
catcagatgatctactttcagcc

SEQ ID NO: 7978 - RNA, 23 nt, synthetic construct
  source 1..23: mol_type = other RNA
atcagatgatctactttcagcct

SEQ ID NO: 7979 - RNA, 23 nt, synthetic construct
  source 1..23: mol_type = other RNA
tcagatgatctactttcagcctt

SEQ ID NO: 7980 - RNA, 23 nt, synthetic construct
  source 1..23: mol_type = other RNA
cagatgatctactttcagccttc

SEQ ID NO: 7981 - RNA, 23 nt, synthetic construct
  source 1..23: mol_type = other RNA
agatgatctactttcagccttcc

SEQ ID NO: 7982 - RNA, 23 nt, synthetic construct
  source 1..23: mol_type = other RNA
gatgatctactttcagccttcct

SEQ ID NO: 7983 - RNA, 23 nt, synthetic construct
  source 1..23: mol_type = other RNA
atgatctactttcagccttcctg

SEQ ID NO: 7984 - RNA, 23 nt, synthetic construct
  source 1..23: mol_type = other RNA
tgatctactttcagccttcctga

SEQ ID NO: 7985 - RNA, 23 nt, synthetic construct
  source 1..23: mol_type = other RNA
gatctactttcagccttcctgag

SEQ ID NO: 7986 - RNA, 23 nt, synthetic construct
  source 1..23: mol_type = other RNA
atctactttcagccttcctgagt

SEQ ID NO: 7987 - RNA, 23 nt, synthetic construct
  source 1..23: mol_type = other RNA
tctactttcagccttcctgagtc

SEQ ID NO: 7988 - RNA, 23 nt, synthetic construct
  source 1..23: mol_type = other RNA
ctactttcagccttcctgagtcc

SEQ ID NO: 7989 - RNA, 23 nt, synthetic construct
  source 1..23: mol_type = other RNA
tttcagccttcctgagtcccaga

SEQ ID NO: 7990 - RNA, 23 nt, synthetic construct
  source 1..23: mol_type = other RNA
cagacaatagaagacaggtggct

SEQ ID NO: 7991 - RNA, 23 nt, synthetic construct
  source 1..23: mol_type = other RNA
agacaatagaagacaggtggctg

SEQ ID NO: 7992 - RNA, 23 nt, synthetic construct
  source 1..23: mol_type = other RNA
gtgtggcagtggtgtctgctgtc

SEQ ID NO: 7993 - RNA, 23 nt, synthetic construct
  source 1..23: mol_type = other RNA
tgtggcagtggtgtctgctgtca

SEQ ID NO: 7994 - RNA, 23 nt, synthetic construct
  source 1..23: mol_type = other RNA
gtggcagtggtgtctgctgtcac

SEQ ID NO: 7995 - RNA, 23 nt, synthetic construct
  source 1..23: mol_type = other RNA
tggcagtggtgtctgctgtcact

SEQ ID NO: 7996 - RNA, 23 nt, synthetic construct
  source 1..23: mol_type = other RNA
ggcagtggtgtctgctgtcactg

SEQ ID NO: 7997 - RNA, 23 nt, synthetic construct
  source 1..23: mol_type = other RNA
gcagtggtgtctgctgtcactgt

SEQ ID NO: 7998 - RNA, 23 nt, synthetic construct
  source 1..23: mol_type = other RNA
cagtggtgtctgctgtcactgtg

SEQ ID NO: 7999 - RNA, 23 nt, synthetic construct
  source 1..23: mol_type = other RNA
agtggtgtctgctgtcactgtgc

SEQ ID NO: 8000 - RNA, 23 nt, synthetic construct
  source 1..23: mol_type = other RNA
gtggtgtctgctgtcactgtgcc

SEQ ID NO: 8001 - RNA, 23 nt, synthetic construct
  source 1..23: mol_type = other RNA
atcagactcaacagacggagcaa

SEQ ID NO: 8002 - RNA, 23 nt, synthetic construct
  source 1..23: mol_type = other RNA
tcagactcaacagacggagcaac

SEQ ID NO: 8003 - RNA, 23 nt, synthetic construct
  source 1..23: mol_type = other RNA
cagactcaacagacggagcaact

SEQ ID NO: 8004 - RNA, 23 nt, synthetic construct
  source 1..23: mol_type = other RNA
agactcaacagacggagcaactg

SEQ ID NO: 8005 - RNA, 23 nt, synthetic construct
  source 1..23: mol_type = other RNA
gactcaacagacggagcaactgc

SEQ ID NO: 8006 - RNA, 23 nt, synthetic construct
  source 1..23: mol_type = other RNA
actcaacagacggagcaactgcc

SEQ ID NO: 8007 - RNA, 23 nt, synthetic construct
  source 1..23: mol_type = other RNA
ctcaacagacggagcaactgcca

SEQ ID NO: 8008 - RNA, 23 nt, synthetic construct
  source 1..23: mol_type = other RNA
tcaacagacggagcaactgccat

SEQ ID NO: 8009 - RNA, 23 nt, synthetic construct
  source 1..23: mol_type = other RNA
caacagacggagcaactgccatc

SEQ ID NO: 8010 - RNA, 23 nt, synthetic construct
  source 1..23: mol_type = other RNA
aacagacggagcaactgccatcc

SEQ ID NO: 8011 - RNA, 23 nt, synthetic construct
  source 1..23: mol_type = other RNA
acagacggagcaactgccatccg

SEQ ID NO: 8012 - RNA, 23 nt, synthetic construct
  source 1..23: mol_type = other RNA
cagacggagcaactgccatccga

SEQ ID NO: 8013 - RNA, 23 nt, synthetic construct
  source 1..23: mol_type = other RNA
agacggagcaactgccatccgag

SEQ ID NO: 8014 - RNA, 23 nt, synthetic construct
  source 1..23: mol_type = other RNA
gacggagcaactgccatccgagg

SEQ ID NO: 8015 - RNA, 23 nt, synthetic construct
  source 1..23: mol_type = other RNA
acggagcaactgccatccgaggc

SEQ ID NO: 8016 - RNA, 23 nt, synthetic construct
  source 1..23: mol_type = other RNA
ggagcaactgccatccgaggctc

SEQ ID NO: 8017 - RNA, 23 nt, synthetic construct
  source 1..23: mol_type = other RNA
gagcaactgccatccgaggctcc

SEQ ID NO: 8018 - RNA, 23 nt, synthetic construct
  source 1..23: mol_type = other RNA
agcaactgccatccgaggctcct

SEQ ID NO: 8019 - RNA, 23 nt, synthetic construct
  source 1..23: mol_type = other RNA
cccaagcagaacgagctctggtg

SEQ ID NO: 8020 - RNA, 23 nt, synthetic construct
  source 1..23: mol_type = other RNA
ccaagcagaacgagctctggtgc

SEQ ID NO: 8021 - RNA, 23 nt, synthetic construct
  source 1..23: mol_type = other RNA
caagcagaacgagctctggtgct

SEQ ID NO: 8022 - RNA, 23 nt, synthetic construct
  source 1..23: mol_type = other RNA
aagcagaacgagctctggtgctg

SEQ ID NO: 8023 - RNA, 23 nt, synthetic construct
  source 1..23: mol_type = other RNA
agcagaacgagctctggtgctgg

SEQ ID NO: 8024 - RNA, 23 nt, synthetic construct
  source 1..23: mol_type = other RNA
gcagaacgagctctggtgctgga

SEQ ID NO: 8025 - RNA, 23 nt, synthetic construct
  source 1..23: mol_type = other RNA
cagaacgagctctggtgctggag

SEQ ID NO: 8026 - RNA, 23 nt, synthetic construct
  source 1..23: mol_type = other RNA
agaacgagctctggtgctggagc

SEQ ID NO: 8027 - RNA, 23 nt, synthetic construct
  source 1..23: mol_type = other RNA
gaacgagctctggtgctggagct

SEQ ID NO: 8028 - RNA, 23 nt, synthetic construct
  source 1..23: mol_type = other RNA
acgagctctggtgctggagctag

SEQ ID NO: 8029 - RNA, 23 nt, synthetic construct
  source 1..23: mol_type = other RNA
gagctctggtgctggagctagcc

SEQ ID NO: 8030 - RNA, 23 nt, synthetic construct
  source 1..23: mol_type = other RNA
agctctggtgctggagctagcca

SEQ ID NO: 8031 - RNA, 23 nt, synthetic construct
  source 1..23: mol_type = other RNA
gctctggtgctggagctagccaa

SEQ ID NO: 8032 - RNA, 23 nt, synthetic construct
  source 1..23: mol_type = other RNA
ctctggtgctggagctagccaag

SEQ ID NO: 8033 - RNA, 23 nt, synthetic construct
  source 1..23: mol_type = other RNA
tctggtgctggagctagccaagc

SEQ ID NO: 8034 - RNA, 23 nt, synthetic construct
  source 1..23: mol_type = other RNA
ctggtgctggagctagccaagca

SEQ ID NO: 8035 - RNA, 23 nt, synthetic construct
  source 1..23: mol_type = other RNA
tggtgctggagctagccaagcag

SEQ ID NO: 8036 - RNA, 23 nt, synthetic construct
  source 1..23: mol_type = other RNA
ggtgctggagctagccaagcagc

SEQ ID NO: 8037 - RNA, 23 nt, synthetic construct
  source 1..23: mol_type = other RNA
ctggagctagccaagcagcaaat

SEQ ID NO: 8038 - RNA, 23 nt, synthetic construct
  source 1..23: mol_type = other RNA
tggagctagccaagcagcaaatc

SEQ ID NO: 8039 - RNA, 23 nt, synthetic construct
  source 1..23: mol_type = other RNA
ggagctagccaagcagcaaatcc

SEQ ID NO: 8040 - RNA, 23 nt, synthetic construct
  source 1..23: mol_type = other RNA
gagctagccaagcagcaaatcct

SEQ ID NO: 8041 - RNA, 23 nt, synthetic construct
  source 1..23: mol_type = other RNA
agctagccaagcagcaaatcctg

SEQ ID NO: 8042 - RNA, 23 nt, synthetic construct
  source 1..23: mol_type = other RNA
gctagccaagcagcaaatcctgg

SEQ ID NO: 8043 - RNA, 23 nt, synthetic construct
  source 1..23: mol_type = other RNA
ctagccaagcagcaaatcctgga

SEQ ID NO: 8044 - RNA, 23 nt, synthetic construct
  source 1..23: mol_type = other RNA
tagccaagcagcaaatcctggat

SEQ ID NO: 8045 - RNA, 23 nt, synthetic construct
  source 1..23: mol_type = other RNA
gcacctgaccagtcgtcccagaa

SEQ ID NO: 8046 - RNA, 23 nt, synthetic construct
  source 1..23: mol_type = other RNA
cacctgaccagtcgtcccagaat

SEQ ID NO: 8047 - RNA, 23 nt, synthetic construct
  source 1..23: mol_type = other RNA
acctgaccagtcgtcccagaata

SEQ ID NO: 8048 - RNA, 23 nt, synthetic construct
  source 1..23: mol_type = other RNA
cctgaccagtcgtcccagaataa

SEQ ID NO: 8049 - RNA, 23 nt, synthetic construct
  source 1..23: mol_type = other RNA
ctgaccagtcgtcccagaataac

SEQ ID NO: 8050 - RNA, 23 nt, synthetic construct
  source 1..23: mol_type = other RNA
tgaccagtcgtcccagaataact

SEQ ID NO: 8051 - RNA, 23 nt, synthetic construct
  source 1..23: mol_type = other RNA
gaccagtcgtcccagaataactc

SEQ ID NO: 8052 - RNA, 23 nt, synthetic construct
  source 1..23: mol_type = other RNA
accagtcgtcccagaataactca

SEQ ID NO: 8053 - RNA, 23 nt, synthetic construct
  source 1..23: mol_type = other RNA
ccagtcgtcccagaataactcat

SEQ ID NO: 8054 - RNA, 23 nt, synthetic construct
  source 1..23: mol_type = other RNA
cagtcgtcccagaataactcatc

SEQ ID NO: 8055 - RNA, 23 nt, synthetic construct
  source 1..23: mol_type = other RNA
agtcgtcccagaataactcatcc

SEQ ID NO: 8056 - RNA, 23 nt, synthetic construct
  source 1..23: mol_type = other RNA
gtcgtcccagaataactcatcct

SEQ ID NO: 8057 - RNA, 23 nt, synthetic construct
  source 1..23: mol_type = other RNA
tcgtcccagaataactcatcctc

SEQ ID NO: 8058 - RNA, 23 nt, synthetic construct
  source 1..23: mol_type = other RNA
cgtcccagaataactcatcctcc

SEQ ID NO: 8059 - RNA, 23 nt, synthetic construct
  source 1..23: mol_type = other RNA
gtcccagaataactcatcctcca

SEQ ID NO: 8060 - RNA, 23 nt, synthetic construct
  source 1..23: mol_type = other RNA
tcccagaataactcatcctccac

SEQ ID NO: 8061 - RNA, 23 nt, synthetic construct
  source 1..23: mol_type = other RNA
cccagaataactcatcctccacc

SEQ ID NO: 8062 - RNA, 23 nt, synthetic construct
  source 1..23: mol_type = other RNA
cagggagtgtggctccagggaat

SEQ ID NO: 8063 - RNA, 23 nt, synthetic construct
  source 1..23: mol_type = other RNA
agggagtgtggctccagggaatg

SEQ ID NO: 8064 - RNA, 23 nt, synthetic construct
  source 1..23: mol_type = other RNA
gggagtgtggctccagggaatgg

SEQ ID NO: 8065 - RNA, 23 nt, synthetic construct
  source 1..23: mol_type = other RNA
ggagtgtggctccagggaatggg

SEQ ID NO: 8066 - RNA, 23 nt, synthetic construct
  source 1..23: mol_type = other RNA
gggaggaggtcatcagctttgct

SEQ ID NO: 8067 - RNA, 23 nt, synthetic construct
  source 1..23: mol_type = other RNA
ggaggaggtcatcagctttgcta

SEQ ID NO: 8068 - RNA, 23 nt, synthetic construct
  source 1..23: mol_type = other RNA
gaggaggtcatcagctttgctac

SEQ ID NO: 8069 - RNA, 23 nt, synthetic construct
  source 1..23: mol_type = other RNA
aggaggtcatcagctttgctact

SEQ ID NO: 8070 - RNA, 23 nt, synthetic construct
  source 1..23: mol_type = other RNA
ggaggtcatcagctttgctactg

SEQ ID NO: 8071 - RNA, 23 nt, synthetic construct
  source 1..23: mol_type = other RNA
gaggtcatcagctttgctactgt

SEQ ID NO: 8072 - RNA, 23 nt, synthetic construct
  source 1..23: mol_type = other RNA
aggtcatcagctttgctactgtc

SEQ ID NO: 8073 - RNA, 23 nt, synthetic construct
  source 1..23: mol_type = other RNA
ggtcatcagctttgctactgtca

SEQ ID NO: 8074 - RNA, 23 nt, synthetic construct
  source 1..23: mol_type = other RNA
catcagctttgctactgtcacag

SEQ ID NO: 8075 - RNA, 23 nt, synthetic construct
  source 1..23: mol_type = other RNA
atcagctttgctactgtcacaga

SEQ ID NO: 8076 - RNA, 23 nt, synthetic construct
  source 1..23: mol_type = other RNA
tcagctttgctactgtcacagac

SEQ ID NO: 8077 - RNA, 23 nt, synthetic construct
  source 1..23: mol_type = other RNA
cagctttgctactgtcacagact

SEQ ID NO: 8078 - RNA, 23 nt, synthetic construct
  source 1..23: mol_type = other RNA
agctttgctactgtcacagactc

SEQ ID NO: 8079 - RNA, 23 nt, synthetic construct
  source 1..23: mol_type = other RNA
gctttgctactgtcacagactcc

SEQ ID NO: 8080 - RNA, 23 nt, synthetic construct
  source 1..23: mol_type = other RNA
ctttgctactgtcacagactcca

SEQ ID NO: 8081 - RNA, 23 nt, synthetic construct
  source 1..23: mol_type = other RNA
tttgctactgtcacagactccac

SEQ ID NO: 8082 - RNA, 23 nt, synthetic construct
  source 1..23: mol_type = other RNA
ctactgtcacagactccacttca

SEQ ID NO: 8083 - RNA, 23 nt, synthetic construct
  source 1..23: mol_type = other RNA
tactgtcacagactccacttcag

SEQ ID NO: 8084 - RNA, 23 nt, synthetic construct
  source 1..23: mol_type = other RNA
actgtcacagactccacttcagc

SEQ ID NO: 8085 - RNA, 23 nt, synthetic construct
  source 1..23: mol_type = other RNA
tgtcacagactccacttcagcct

SEQ ID NO: 8086 - RNA, 23 nt, synthetic construct
  source 1..23: mol_type = other RNA
gtcacagactccacttcagccta

SEQ ID NO: 8087 - RNA, 23 nt, synthetic construct
  source 1..23: mol_type = other RNA
tcacagactccacttcagcctac

SEQ ID NO: 8088 - RNA, 23 nt, synthetic construct
  source 1..23: mol_type = other RNA
cacagactccacttcagcctaca

SEQ ID NO: 8089 - RNA, 23 nt, synthetic construct
  source 1..23: mol_type = other RNA
acagactccacttcagcctacag

SEQ ID NO: 8090 - RNA, 23 nt, synthetic construct
  source 1..23: mol_type = other RNA
cagactccacttcagcctacagc

SEQ ID NO: 8091 - RNA, 23 nt, synthetic construct
  source 1..23: mol_type = other RNA
agactccacttcagcctacagct

SEQ ID NO: 8092 - RNA, 23 nt, synthetic construct
  source 1..23: mol_type = other RNA
gactccacttcagcctacagctc

SEQ ID NO: 8093 - RNA, 23 nt, synthetic construct
  source 1..23: mol_type = other RNA
actccacttcagcctacagctcc

SEQ ID NO: 8094 - RNA, 23 nt, synthetic construct
  source 1..23: mol_type = other RNA
ctccacttcagcctacagctccc

SEQ ID NO: 8095 - RNA, 23 nt, synthetic construct
  source 1..23: mol_type = other RNA
tccacttcagcctacagctccct

SEQ ID NO: 8096 - RNA, 23 nt, synthetic construct
  source 1..23: mol_type = other RNA
ccacttcagcctacagctccctg

SEQ ID NO: 8097 - RNA, 23 nt, synthetic construct
  source 1..23: mol_type = other RNA
cttcagcctacagctccctgctc

SEQ ID NO: 8098 - RNA, 23 nt, synthetic construct
  source 1..23: mol_type = other RNA
accacctgtaccatgcccgcctg

SEQ ID NO: 8099 - RNA, 23 nt, synthetic construct
  source 1..23: mol_type = other RNA
cacctgtaccatgcccgcctgtg

SEQ ID NO: 8100 - RNA, 23 nt, synthetic construct
  source 1..23: mol_type = other RNA
acctgtaccatgcccgcctgtgg

SEQ ID NO: 8101 - RNA, 23 nt, synthetic construct
  source 1..23: mol_type = other RNA
tgtaccatgcccgcctgtggctg

SEQ ID NO: 8102 - RNA, 23 nt, synthetic construct
  source 1..23: mol_type = other RNA
cccacccttcctggcactctttg

SEQ ID NO: 8103 - RNA, 23 nt, synthetic construct
  source 1..23: mol_type = other RNA
ccacccttcctggcactctttgc

SEQ ID NO: 8104 - RNA, 23 nt, synthetic construct
  source 1..23: mol_type = other RNA
cacccttcctggcactctttgct

SEQ ID NO: 8105 - RNA, 23 nt, synthetic construct
  source 1..23: mol_type = other RNA
acccttcctggcactctttgctt

SEQ ID NO: 8106 - RNA, 23 nt, synthetic construct
  source 1..23: mol_type = other RNA
cccttcctggcactctttgcttg

SEQ ID NO: 8107 - RNA, 23 nt, synthetic construct
  source 1..23: mol_type = other RNA
ccttcctggcactctttgcttga

SEQ ID NO: 8108 - RNA, 23 nt, synthetic construct
  source 1..23: mol_type = other RNA
cttcctggcactctttgcttgag

SEQ ID NO: 8109 - RNA, 23 nt, synthetic construct
  source 1..23: mol_type = other RNA
ttcctggcactctttgcttgagg

SEQ ID NO: 8110 - RNA, 23 nt, synthetic construct
  source 1..23: mol_type = other RNA
tcctggcactctttgcttgagga

SEQ ID NO: 8111 - RNA, 23 nt, synthetic construct
  source 1..23: mol_type = other RNA
cctggcactctttgcttgaggat

SEQ ID NO: 8112 - RNA, 23 nt, synthetic construct
  source 1..23: mol_type = other RNA
ctggcactctttgcttgaggatc

SEQ ID NO: 8113 - RNA, 23 nt, synthetic construct
  source 1..23: mol_type = other RNA
tggcactctttgcttgaggatct

SEQ ID NO: 8114 - RNA, 23 nt, synthetic construct
  source 1..23: mol_type = other RNA
gcactctttgcttgaggatcttc

SEQ ID NO: 8115 - RNA, 23 nt, synthetic construct
  source 1..23: mol_type = other RNA
cactctttgcttgaggatcttcc

SEQ ID NO: 8116 - RNA, 23 nt, synthetic construct
  source 1..23: mol_type = other RNA
actctttgcttgaggatcttccg

SEQ ID NO: 8117 - RNA, 23 nt, synthetic construct
  source 1..23: mol_type = other RNA
ctctttgcttgaggatcttccga

SEQ ID NO: 8118 - RNA, 23 nt, synthetic construct
  source 1..23: mol_type = other RNA
tctttgcttgaggatcttccgat

SEQ ID NO: 8119 - RNA, 23 nt, synthetic construct
  source 1..23: mol_type = other RNA
ctttgcttgaggatcttccgatg

SEQ ID NO: 8120 - RNA, 23 nt, synthetic construct
  source 1..23: mol_type = other RNA
tttgcttgaggatcttccgatgg

SEQ ID NO: 8121 - RNA, 23 nt, synthetic construct
  source 1..23: mol_type = other RNA
ttgcttgaggatcttccgatggg

SEQ ID NO: 8122 - RNA, 23 nt, synthetic construct
  source 1..23: mol_type = other RNA
tcctggctgagcaccacatcacc

SEQ ID NO: 8123 - RNA, 23 nt, synthetic construct
  source 1..23: mol_type = other RNA
cctggctgagcaccacatcacca

SEQ ID NO: 8124 - RNA, 23 nt, synthetic construct
  source 1..23: mol_type = other RNA
ctggctgagcaccacatcaccaa

SEQ ID NO: 8125 - RNA, 23 nt, synthetic construct
  source 1..23: mol_type = other RNA
tggctgagcaccacatcaccaac

SEQ ID NO: 8126 - RNA, 23 nt, synthetic construct
  source 1..23: mol_type = other RNA
ggctgagcaccacatcaccaacc

SEQ ID NO: 8127 - RNA, 23 nt, synthetic construct
  source 1..23: mol_type = other RNA
gctgagcaccacatcaccaacct

SEQ ID NO: 8128 - RNA, 23 nt, synthetic construct
  source 1..23: mol_type = other RNA
ctgagcaccacatcaccaacctg

SEQ ID NO: 8129 - RNA, 23 nt, synthetic construct
  source 1..23: mol_type = other RNA
tgagcaccacatcaccaacctgg

SEQ ID NO: 8130 - RNA, 23 nt, synthetic construct
  source 1..23: mol_type = other RNA
gagcaccacatcaccaacctggg

SEQ ID NO: 8131 - RNA, 23 nt, synthetic construct
  source 1..23: mol_type = other RNA
caccacatcaccaacctgggctg

SEQ ID NO: 8132 - RNA, 23 nt, synthetic construct
  source 1..23: mol_type = other RNA
accacatcaccaacctgggctgg

SEQ ID NO: 8133 - RNA, 23 nt, synthetic construct
  source 1..23: mol_type = other RNA
ccacatcaccaacctgggctggc

SEQ ID NO: 8134 - RNA, 23 nt, synthetic construct
  source 1..23: mol_type = other RNA
acatcaccaacctgggctggcat

SEQ ID NO: 8135 - RNA, 23 nt, synthetic construct
  source 1..23: mol_type = other RNA
catcaccaacctgggctggcata

SEQ ID NO: 8136 - RNA, 23 nt, synthetic construct
  source 1..23: mol_type = other RNA
cataccttaactctgccctctag

SEQ ID NO: 8137 - RNA, 23 nt, synthetic construct
  source 1..23: mol_type = other RNA
ataccttaactctgccctctagt

SEQ ID NO: 8138 - RNA, 23 nt, synthetic construct
  source 1..23: mol_type = other RNA
taccttaactctgccctctagtg

SEQ ID NO: 8139 - RNA, 23 nt, synthetic construct
  source 1..23: mol_type = other RNA
accttaactctgccctctagtgg

SEQ ID NO: 8140 - RNA, 23 nt, synthetic construct
  source 1..23: mol_type = other RNA
ccttaactctgccctctagtggc

SEQ ID NO: 8141 - RNA, 23 nt, synthetic construct
  source 1..23: mol_type = other RNA
cttaactctgccctctagtggct

SEQ ID NO: 8142 - RNA, 23 nt, synthetic construct
  source 1..23: mol_type = other RNA
agaagtctggtgtcctgaaactg

SEQ ID NO: 8143 - RNA, 23 nt, synthetic construct
  source 1..23: mol_type = other RNA
gaagtctggtgtcctgaaactgc

SEQ ID NO: 8144 - RNA, 23 nt, synthetic construct
  source 1..23: mol_type = other RNA
aagtctggtgtcctgaaactgca

SEQ ID NO: 8145 - RNA, 23 nt, synthetic construct
  source 1..23: mol_type = other RNA
agtctggtgtcctgaaactgcaa

SEQ ID NO: 8146 - RNA, 23 nt, synthetic construct
  source 1..23: mol_type = other RNA
gtctggtgtcctgaaactgcaac

SEQ ID NO: 8147 - RNA, 23 nt, synthetic construct
  source 1..23: mol_type = other RNA
tctggtgtcctgaaactgcaact

SEQ ID NO: 8148 - RNA, 23 nt, synthetic construct
  source 1..23: mol_type = other RNA
ctggtgtcctgaaactgcaacta

SEQ ID NO: 8149 - RNA, 23 nt, synthetic construct
  source 1..23: mol_type = other RNA
tggtgtcctgaaactgcaactag

SEQ ID NO: 8150 - RNA, 23 nt, synthetic construct
  source 1..23: mol_type = other RNA
ggtgtcctgaaactgcaactaga

SEQ ID NO: 8151 - RNA, 23 nt, synthetic construct
  source 1..23: mol_type = other RNA
gtgtcctgaaactgcaactagac

SEQ ID NO: 8152 - RNA, 23 nt, synthetic construct
  source 1..23: mol_type = other RNA
tgtcctgaaactgcaactagact

SEQ ID NO: 8153 - RNA, 23 nt, synthetic construct
  source 1..23: mol_type = other RNA
gtcctgaaactgcaactagactg

SEQ ID NO: 8154 - RNA, 23 nt, synthetic construct
  source 1..23: mol_type = other RNA
tcctgaaactgcaactagactgc

SEQ ID NO: 8155 - RNA, 23 nt, synthetic construct
  source 1..23: mol_type = other RNA
cctgaaactgcaactagactgca

SEQ ID NO: 8156 - RNA, 23 nt, synthetic construct
  source 1..23: mol_type = other RNA
ctgaaactgcaactagactgcag

SEQ ID NO: 8157 - RNA, 23 nt, synthetic construct
  source 1..23: mol_type = other RNA
tgaaactgcaactagactgcaga

SEQ ID NO: 8158 - RNA, 23 nt, synthetic construct
  source 1..23: mol_type = other RNA
gaaactgcaactagactgcagac

SEQ ID NO: 8159 - RNA, 23 nt, synthetic construct
  source 1..23: mol_type = other RNA
aactgcaactagactgcagaccc

SEQ ID NO: 8160 - RNA, 23 nt, synthetic construct
  source 1..23: mol_type = other RNA
aaggcaacagcacagttactgga

SEQ ID NO: 8161 - RNA, 23 nt, synthetic construct
  source 1..23: mol_type = other RNA
aggcaacagcacagttactggac

SEQ ID NO: 8162 - RNA, 23 nt, synthetic construct
  source 1..23: mol_type = other RNA
ggcaacagcacagttactggaca

SEQ ID NO: 8163 - RNA, 23 nt, synthetic construct
  source 1..23: mol_type = other RNA
gcaacagcacagttactggacaa

SEQ ID NO: 8164 - RNA, 23 nt, synthetic construct
  source 1..23: mol_type = other RNA
caacagcacagttactggacaac

SEQ ID NO: 8165 - RNA, 23 nt, synthetic construct
  source 1..23: mol_type = other RNA
aacagcacagttactggacaacc

SEQ ID NO: 8166 - RNA, 23 nt, synthetic construct
  source 1..23: mol_type = other RNA
acagcacagttactggacaaccg

SEQ ID NO: 8167 - RNA, 23 nt, synthetic construct
  source 1..23: mol_type = other RNA
ctcttggacacagcaggacacca

SEQ ID NO: 8168 - RNA, 23 nt, synthetic construct
  source 1..23: mol_type = other RNA
tcttggacacagcaggacaccag

SEQ ID NO: 8169 - RNA, 23 nt, synthetic construct
  source 1..23: mol_type = other RNA
cttggacacagcaggacaccagc

SEQ ID NO: 8170 - RNA, 23 nt, synthetic construct
  source 1..23: mol_type = other RNA
ttggacacagcaggacaccagca

SEQ ID NO: 8171 - RNA, 23 nt, synthetic construct
  source 1..23: mol_type = other RNA
tggacacagcaggacaccagcag

SEQ ID NO: 8172 - RNA, 23 nt, synthetic construct
  source 1..23: mol_type = other RNA
ggacacagcaggacaccagcagc

SEQ ID NO: 8173 - RNA, 23 nt, synthetic construct
  source 1..23: mol_type = other RNA
gacacagcaggacaccagcagcc

SEQ ID NO: 8174 - RNA, 23 nt, synthetic construct
  source 1..23: mol_type = other RNA
cagcaggacaccagcagcccttc

SEQ ID NO: 8175 - RNA, 23 nt, synthetic construct
  source 1..23: mol_type = other RNA
caggacaccagcagcccttccta

SEQ ID NO: 8176 - RNA, 23 nt, synthetic construct
  source 1..23: mol_type = other RNA
aggacaccagcagcccttcctag

SEQ ID NO: 8177 - RNA, 23 nt, synthetic construct
  source 1..23: mol_type = other RNA
ggacaccagcagcccttcctaga

SEQ ID NO: 8178 - RNA, 23 nt, synthetic construct
  source 1..23: mol_type = other RNA
acaccagcagcccttcctagagc

SEQ ID NO: 8179 - RNA, 23 nt, synthetic construct
  source 1..23: mol_type = other RNA
caccagcagcccttcctagagct

SEQ ID NO: 8180 - RNA, 23 nt, synthetic construct
  source 1..23: mol_type = other RNA
accagcagcccttcctagagctt

SEQ ID NO: 8181 - RNA, 23 nt, synthetic construct
  source 1..23: mol_type = other RNA
cagcagcccttcctagagcttaa

SEQ ID NO: 8182 - RNA, 23 nt, synthetic construct
  source 1..23: mol_type = other RNA
agcagcccttcctagagcttaag

SEQ ID NO: 8183 - RNA, 23 nt, synthetic construct
  source 1..23: mol_type = other RNA
gcagcccttcctagagcttaaga

SEQ ID NO: 8184 - RNA, 23 nt, synthetic construct
  source 1..23: mol_type = other RNA
cagcccttcctagagcttaagat

SEQ ID NO: 8185 - RNA, 23 nt, synthetic construct
  source 1..23: mol_type = other RNA
agcccttcctagagcttaagatc

SEQ ID NO: 8186 - RNA, 23 nt, synthetic construct
  source 1..23: mol_type = other RNA
gcccttcctagagcttaagatcc

SEQ ID NO: 8187 - RNA, 23 nt, synthetic construct
  source 1..23: mol_type = other RNA
cattacgtagacttccaggaact

SEQ ID NO: 8188 - RNA, 23 nt, synthetic construct
  source 1..23: mol_type = other RNA
attacgtagacttccaggaactg

SEQ ID NO: 8189 - RNA, 23 nt, synthetic construct
  source 1..23: mol_type = other RNA
ttacgtagacttccaggaactgg

SEQ ID NO: 8190 - RNA, 23 nt, synthetic construct
  source 1..23: mol_type = other RNA
tacgtagacttccaggaactggg

SEQ ID NO: 8191 - RNA, 23 nt, synthetic construct
  source 1..23: mol_type = other RNA
cgtagacttccaggaactgggat

SEQ ID NO: 8192 - RNA, 23 nt, synthetic construct
  source 1..23: mol_type = other RNA
gtagacttccaggaactgggatg

SEQ ID NO: 8193 - RNA, 23 nt, synthetic construct
  source 1..23: mol_type = other RNA
tagacttccaggaactgggatgg

SEQ ID NO: 8194 - RNA, 23 nt, synthetic construct
  source 1..23: mol_type = other RNA
agacttccaggaactgggatggc

SEQ ID NO: 8195 - RNA, 23 nt, synthetic construct
  source 1..23: mol_type = other RNA
gacttccaggaactgggatggcg

SEQ ID NO: 8196 - RNA, 23 nt, synthetic construct
  source 1..23: mol_type = other RNA
gggactggatactgcagcccgag

SEQ ID NO: 8197 - RNA, 23 nt, synthetic construct
  source 1..23: mol_type = other RNA
ggactggatactgcagcccgagg

SEQ ID NO: 8198 - RNA, 23 nt, synthetic construct
  source 1..23: mol_type = other RNA
gactggatactgcagcccgaggg

SEQ ID NO: 8199 - RNA, 23 nt, synthetic construct
  source 1..23: mol_type = other RNA
gggtaccagctgaattactgcag

SEQ ID NO: 8200 - RNA, 23 nt, synthetic construct
  source 1..23: mol_type = other RNA
ggtaccagctgaattactgcagt

SEQ ID NO: 8201 - RNA, 23 nt, synthetic construct
  source 1..23: mol_type = other RNA
gtaccagctgaattactgcagtg

SEQ ID NO: 8202 - RNA, 23 nt, synthetic construct
  source 1..23: mol_type = other RNA
taccagctgaattactgcagtgg

SEQ ID NO: 8203 - RNA, 23 nt, synthetic construct
  source 1..23: mol_type = other RNA
accagctgaattactgcagtggg

SEQ ID NO: 8204 - RNA, 23 nt, synthetic construct
  source 1..23: mol_type = other RNA
ccagctgaattactgcagtgggc

SEQ ID NO: 8205 - RNA, 23 nt, synthetic construct
  source 1..23: mol_type = other RNA
cagctgaattactgcagtgggca

SEQ ID NO: 8206 - RNA, 23 nt, synthetic construct
  source 1..23: mol_type = other RNA
agctgaattactgcagtgggcag

SEQ ID NO: 8207 - RNA, 23 nt, synthetic construct
  source 1..23: mol_type = other RNA
gctgaattactgcagtgggcagt

SEQ ID NO: 8208 - RNA, 23 nt, synthetic construct
  source 1..23: mol_type = other RNA
ctgaattactgcagtgggcagtg

SEQ ID NO: 8209 - RNA, 23 nt, synthetic construct
  source 1..23: mol_type = other RNA
ttactgcagtgggcagtgccctc

SEQ ID NO: 8210 - RNA, 23 nt, synthetic construct
  source 1..23: mol_type = other RNA
cccaggcattgctgcctctttcc

SEQ ID NO: 8211 - RNA, 23 nt, synthetic construct
  source 1..23: mol_type = other RNA
ccaggcattgctgcctctttcca

SEQ ID NO: 8212 - RNA, 23 nt, synthetic construct
  source 1..23: mol_type = other RNA
caggcattgctgcctctttccat

SEQ ID NO: 8213 - RNA, 23 nt, synthetic construct
  source 1..23: mol_type = other RNA
aggcattgctgcctctttccatt

SEQ ID NO: 8214 - RNA, 23 nt, synthetic construct
  source 1..23: mol_type = other RNA
ggcattgctgcctctttccattc

SEQ ID NO: 8215 - RNA, 23 nt, synthetic construct
  source 1..23: mol_type = other RNA
gcattgctgcctctttccattct

SEQ ID NO: 8216 - RNA, 23 nt, synthetic construct
  source 1..23: mol_type = other RNA
cattgctgcctctttccattctg

SEQ ID NO: 8217 - RNA, 23 nt, synthetic construct
  source 1..23: mol_type = other RNA
attgctgcctctttccattctgc

SEQ ID NO: 8218 - RNA, 23 nt, synthetic construct
  source 1..23: mol_type = other RNA
ttgctgcctctttccattctgcc

SEQ ID NO: 8219 - RNA, 23 nt, synthetic construct
  source 1..23: mol_type = other RNA
tgctgcctctttccattctgccg

SEQ ID NO: 8220 - RNA, 23 nt, synthetic construct
  source 1..23: mol_type = other RNA
gctgcctctttccattctgccgt

SEQ ID NO: 8221 - RNA, 23 nt, synthetic construct
  source 1..23: mol_type = other RNA
ctgcctctttccattctgccgtc

SEQ ID NO: 8222 - RNA, 23 nt, synthetic construct
  source 1..23: mol_type = other RNA
tgcctctttccattctgccgtct

SEQ ID NO: 8223 - RNA, 23 nt, synthetic construct
  source 1..23: mol_type = other RNA
gcctctttccattctgccgtctt

SEQ ID NO: 8224 - RNA, 23 nt, synthetic construct
  source 1..23: mol_type = other RNA
cctctttccattctgccgtcttc

SEQ ID NO: 8225 - RNA, 23 nt, synthetic construct
  source 1..23: mol_type = other RNA
ctctttccattctgccgtcttca

SEQ ID NO: 8226 - RNA, 23 nt, synthetic construct
  source 1..23: mol_type = other RNA
tctttccattctgccgtcttcag

SEQ ID NO: 8227 - RNA, 23 nt, synthetic construct
  source 1..23: mol_type = other RNA
ctttccattctgccgtcttcagc

SEQ ID NO: 8228 - RNA, 23 nt, synthetic construct
  source 1..23: mol_type = other RNA
tttccattctgccgtcttcagcc

SEQ ID NO: 8229 - RNA, 23 nt, synthetic construct
  source 1..23: mol_type = other RNA
ttccattctgccgtcttcagcct

SEQ ID NO: 8230 - RNA, 23 nt, synthetic construct
  source 1..23: mol_type = other RNA
tccattctgccgtcttcagcctc

SEQ ID NO: 8231 - RNA, 23 nt, synthetic construct
  source 1..23: mol_type = other RNA
attctgccgtcttcagcctcctc

SEQ ID NO: 8232 - RNA, 23 nt, synthetic construct
  source 1..23: mol_type = other RNA
tgccgtcttcagcctcctcaaag

SEQ ID NO: 8233 - RNA, 23 nt, synthetic construct
  source 1..23: mol_type = other RNA
gccgtcttcagcctcctcaaagc

SEQ ID NO: 8234 - RNA, 23 nt, synthetic construct
  source 1..23: mol_type = other RNA
ccgtcttcagcctcctcaaagcc

SEQ ID NO: 8235 - RNA, 23 nt, synthetic construct
  source 1..23: mol_type = other RNA
cgtcttcagcctcctcaaagcca

SEQ ID NO: 8236 - RNA, 23 nt, synthetic construct
  source 1..23: mol_type = other RNA
gtcttcagcctcctcaaagccaa

SEQ ID NO: 8237 - RNA, 23 nt, synthetic construct
  source 1..23: mol_type = other RNA
cttcagcctcctcaaagccaaca

SEQ ID NO: 8238 - RNA, 23 nt, synthetic construct
  source 1..23: mol_type = other RNA
ttcagcctcctcaaagccaacaa

SEQ ID NO: 8239 - RNA, 23 nt, synthetic construct
  source 1..23: mol_type = other RNA
tcagcctcctcaaagccaacaat

SEQ ID NO: 8240 - RNA, 23 nt, synthetic construct
  source 1..23: mol_type = other RNA
cagcctcctcaaagccaacaatc

SEQ ID NO: 8241 - RNA, 23 nt, synthetic construct
  source 1..23: mol_type = other RNA
agcctcctcaaagccaacaatcc

SEQ ID NO: 8242 - RNA, 23 nt, synthetic construct
  source 1..23: mol_type = other RNA
gcctcctcaaagccaacaatcct

SEQ ID NO: 8243 - RNA, 23 nt, synthetic construct
  source 1..23: mol_type = other RNA
cctcctcaaagccaacaatcctt

SEQ ID NO: 8244 - RNA, 23 nt, synthetic construct
  source 1..23: mol_type = other RNA
ctcctcaaagccaacaatccttg

SEQ ID NO: 8245 - RNA, 23 nt, synthetic construct
  source 1..23: mol_type = other RNA
tcctcaaagccaacaatccttgg

SEQ ID NO: 8246 - RNA, 23 nt, synthetic construct
  source 1..23: mol_type = other RNA
caaagccaacaatccttggcctg

SEQ ID NO: 8247 - RNA, 23 nt, synthetic construct
  source 1..23: mol_type = other RNA
aaagccaacaatccttggcctgc

SEQ ID NO: 8248 - RNA, 23 nt, synthetic construct
  source 1..23: mol_type = other RNA
aagccaacaatccttggcctgcc

SEQ ID NO: 8249 - RNA, 23 nt, synthetic construct
  source 1..23: mol_type = other RNA
agccaacaatccttggcctgcca

SEQ ID NO: 8250 - RNA, 23 nt, synthetic construct
  source 1..23: mol_type = other RNA
ccaacaatccttggcctgccagt

SEQ ID NO: 8251 - RNA, 23 nt, synthetic construct
  source 1..23: mol_type = other RNA
caacaatccttggcctgccagta

SEQ ID NO: 8252 - RNA, 23 nt, synthetic construct
  source 1..23: mol_type = other RNA
ccttggcctgccagtacctcctg

SEQ ID NO: 8253 - RNA, 23 nt, synthetic construct
  source 1..23: mol_type = other RNA
ctgttgtgtccctactgcccgaa

SEQ ID NO: 8254 - RNA, 23 nt, synthetic construct
  source 1..23: mol_type = other RNA
tgttgtgtccctactgcccgaag

SEQ ID NO: 8255 - RNA, 23 nt, synthetic construct
  source 1..23: mol_type = other RNA
gttgtgtccctactgcccgaagg

SEQ ID NO: 8256 - RNA, 23 nt, synthetic construct
  source 1..23: mol_type = other RNA
ttgtgtccctactgcccgaaggc

SEQ ID NO: 8257 - RNA, 23 nt, synthetic construct
  source 1..23: mol_type = other RNA
tgtgtccctactgcccgaaggcc

SEQ ID NO: 8258 - RNA, 23 nt, synthetic construct
  source 1..23: mol_type = other RNA
cctctctctcctctacctggatc

SEQ ID NO: 8259 - RNA, 23 nt, synthetic construct
  source 1..23: mol_type = other RNA
ctctctctcctctacctggatca

SEQ ID NO: 8260 - RNA, 23 nt, synthetic construct
  source 1..23: mol_type = other RNA
tctctctcctctacctggatcat

SEQ ID NO: 8261 - RNA, 23 nt, synthetic construct
  source 1..23: mol_type = other RNA
ctctctcctctacctggatcata

SEQ ID NO: 8262 - RNA, 23 nt, synthetic construct
  source 1..23: mol_type = other RNA
tctctcctctacctggatcataa

SEQ ID NO: 8263 - RNA, 23 nt, synthetic construct
  source 1..23: mol_type = other RNA
ctctcctctacctggatcataat

SEQ ID NO: 8264 - RNA, 23 nt, synthetic construct
  source 1..23: mol_type = other RNA
tctcctctacctggatcataatg

SEQ ID NO: 8265 - RNA, 23 nt, synthetic construct
  source 1..23: mol_type = other RNA
ctcctctacctggatcataatgg

SEQ ID NO: 8266 - RNA, 23 nt, synthetic construct
  source 1..23: mol_type = other RNA
tcctctacctggatcataatggc

SEQ ID NO: 8267 - RNA, 23 nt, synthetic construct
  source 1..23: mol_type = other RNA
cctctacctggatcataatggca

SEQ ID NO: 8268 - RNA, 23 nt, synthetic construct
  source 1..23: mol_type = other RNA
ctctacctggatcataatggcaa

SEQ ID NO: 8269 - RNA, 23 nt, synthetic construct
  source 1..23: mol_type = other RNA
tctacctggatcataatggcaat

SEQ ID NO: 8270 - RNA, 23 nt, synthetic construct
  source 1..23: mol_type = other RNA
ctacctggatcataatggcaatg

SEQ ID NO: 8271 - RNA, 23 nt, synthetic construct
  source 1..23: mol_type = other RNA
tacctggatcataatggcaatgt

SEQ ID NO: 8272 - RNA, 23 nt, synthetic construct
  source 1..23: mol_type = other RNA
acctggatcataatggcaatgtg

SEQ ID NO: 8273 - RNA, 23 nt, synthetic construct
  source 1..23: mol_type = other RNA
cctggatcataatggcaatgtgg

SEQ ID NO: 8274 - RNA, 23 nt, synthetic construct
  source 1..23: mol_type = other RNA
ctggatcataatggcaatgtggt

SEQ ID NO: 8275 - RNA, 23 nt, synthetic construct
  source 1..23: mol_type = other RNA
tggatcataatggcaatgtggtc

SEQ ID NO: 8276 - RNA, 23 nt, synthetic construct
  source 1..23: mol_type = other RNA
ggatcataatggcaatgtggtca

SEQ ID NO: 8277 - RNA, 23 nt, synthetic construct
  source 1..23: mol_type = other RNA
gatcataatggcaatgtggtcaa

SEQ ID NO: 8278 - RNA, 23 nt, synthetic construct
  source 1..23: mol_type = other RNA
atcataatggcaatgtggtcaag

SEQ ID NO: 8279 - RNA, 23 nt, synthetic construct
  source 1..23: mol_type = other RNA
tcataatggcaatgtggtcaaga

SEQ ID NO: 8280 - RNA, 23 nt, synthetic construct
  source 1..23: mol_type = other RNA
cataatggcaatgtggtcaagac

SEQ ID NO: 8281 - RNA, 23 nt, synthetic construct
  source 1..23: mol_type = other RNA
ataatggcaatgtggtcaagacg

SEQ ID NO: 8282 - RNA, 23 nt, synthetic construct
  source 1..23: mol_type = other RNA
taatggcaatgtggtcaagacgg

SEQ ID NO: 8283 - RNA, 23 nt, synthetic construct
  source 1..23: mol_type = other RNA
aatggcaatgtggtcaagacgga

SEQ ID NO: 8284 - RNA, 23 nt, synthetic construct
  source 1..23: mol_type = other RNA
atggcaatgtggtcaagacggat

SEQ ID NO: 8285 - RNA, 23 nt, synthetic construct
  source 1..23: mol_type = other RNA
tggcaatgtggtcaagacggatg

SEQ ID NO: 8286 - RNA, 23 nt, synthetic construct
  source 1..23: mol_type = other RNA
ggcaatgtggtcaagacggatgt

SEQ ID NO: 8287 - RNA, 23 nt, synthetic construct
  source 1..23: mol_type = other RNA
gcaatgtggtcaagacggatgtg

SEQ ID NO: 8288 - RNA, 23 nt, synthetic construct
  source 1..23: mol_type = other RNA
caatgtggtcaagacggatgtgc

SEQ ID NO: 8289 - RNA, 23 nt, synthetic construct
  source 1..23: mol_type = other RNA
aatgtggtcaagacggatgtgcc

SEQ ID NO: 8290 - RNA, 23 nt, synthetic construct
  source 1..23: mol_type = other RNA
atgtggtcaagacggatgtgcca

SEQ ID NO: 8291 - RNA, 23 nt, synthetic construct
  source 1..23: mol_type = other RNA
tgtggtcaagacggatgtgccag

SEQ ID NO: 8292 - RNA, 23 nt, synthetic construct
  source 1..23: mol_type = other RNA
gtggtcaagacggatgtgccaga

SEQ ID NO: 8293 - RNA, 23 nt, synthetic construct
  source 1..23: mol_type = other RNA
tggtcaagacggatgtgccagat

SEQ ID NO: 8294 - RNA, 23 nt, synthetic construct
  source 1..23: mol_type = other RNA
ggtcaagacggatgtgccagata

SEQ ID NO: 8295 - RNA, 23 nt, synthetic construct
  source 1..23: mol_type = other RNA
gtcaagacggatgtgccagatat

SEQ ID NO: 8296 - RNA, 23 nt, synthetic construct
  source 1..23: mol_type = other RNA
tcaagacggatgtgccagatatg

SEQ ID NO: 8297 - RNA, 23 nt, synthetic construct
  source 1..23: mol_type = other RNA
caagacggatgtgccagatatgg

SEQ ID NO: 8298 - RNA, 23 nt, synthetic construct
  source 1..23: mol_type = other RNA
aagacggatgtgccagatatggt

SEQ ID NO: 8299 - RNA, 23 nt, synthetic construct
  source 1..23: mol_type = other RNA
agacggatgtgccagatatggtg

SEQ ID NO: 8300 - RNA, 23 nt, synthetic construct
  source 1..23: mol_type = other RNA
gacggatgtgccagatatggtgg

SEQ ID NO: 8301 - RNA, 23 nt, synthetic construct
  source 1..23: mol_type = other RNA
cggatgtgccagatatggtggtg

SEQ ID NO: 8302 - RNA, 23 nt, synthetic construct
  source 1..23: mol_type = other RNA
ggatgtgccagatatggtggtgg

SEQ ID NO: 8303 - RNA, 23 nt, synthetic construct
  source 1..23: mol_type = other RNA
gatgtgccagatatggtggtgga

SEQ ID NO: 8304 - RNA, 23 nt, synthetic construct
  source 1..23: mol_type = other RNA
atgtgccagatatggtggtggag

SEQ ID NO: 8305 - RNA, 23 nt, synthetic construct
  source 1..23: mol_type = other RNA
tgtgccagatatggtggtggagg

SEQ ID NO: 8306 - RNA, 23 nt, synthetic construct
  source 1..23: mol_type = other RNA
tgccagatatggtggtggaggcc

SEQ ID NO: 8307 - RNA, 23 nt, synthetic construct
  source 1..23: mol_type = other RNA
tatggtggtggaggcctgtggct

SEQ ID NO: 8308 - RNA, 23 nt, synthetic construct
  source 1..23: mol_type = other RNA
atggtggtggaggcctgtggctg

SEQ ID NO: 8309 - RNA, 23 nt, synthetic construct
  source 1..23: mol_type = other RNA
tggaggcctgtggctgcagctag

SEQ ID NO: 8310 - RNA, 23 nt, synthetic construct
  source 1..23: mol_type = other RNA
aggcctgtggctgcagctagcaa

SEQ ID NO: 8311 - RNA, 23 nt, synthetic construct
  source 1..23: mol_type = other RNA
ggcctgtggctgcagctagcaag

SEQ ID NO: 8312 - RNA, 23 nt, synthetic construct
  source 1..23: mol_type = other RNA
gcctgtggctgcagctagcaaga

SEQ ID NO: 8313 - RNA, 23 nt, synthetic construct
  source 1..23: mol_type = other RNA
cctgtggctgcagctagcaagag

SEQ ID NO: 8314 - RNA, 23 nt, synthetic construct
  source 1..23: mol_type = other RNA
ctgtggctgcagctagcaagagg

SEQ ID NO: 8315 - RNA, 23 nt, synthetic construct
  source 1..23: mol_type = other RNA
tgtggctgcagctagcaagagga

SEQ ID NO: 8316 - RNA, 23 nt, synthetic construct
  source 1..23: mol_type = other RNA
gtggctgcagctagcaagaggac

SEQ ID NO: 8317 - RNA, 23 nt, synthetic construct
  source 1..23: mol_type = other RNA
tggctgcagctagcaagaggacc

SEQ ID NO: 8318 - RNA, 23 nt, synthetic construct
  source 1..23: mol_type = other RNA
ggctgcagctagcaagaggacct

SEQ ID NO: 8319 - RNA, 23 nt, synthetic construct
  source 1..23: mol_type = other RNA
gctgcagctagcaagaggacctg

SEQ ID NO: 8320 - RNA, 23 nt, synthetic construct
  source 1..23: mol_type = other RNA
ctgcagctagcaagaggacctgg

SEQ ID NO: 8321 - RNA, 23 nt, synthetic construct
  source 1..23: mol_type = other RNA
tgcagctagcaagaggacctggg

SEQ ID NO: 8322 - RNA, 23 nt, synthetic construct
  source 1..23: mol_type = other RNA
gggctttggagtgaagagaccaa

SEQ ID NO: 8323 - RNA, 23 nt, synthetic construct
  source 1..23: mol_type = other RNA
ggctttggagtgaagagaccaag

SEQ ID NO: 8324 - RNA, 23 nt, synthetic construct
  source 1..23: mol_type = other RNA
gctttggagtgaagagaccaaga

SEQ ID NO: 8325 - RNA, 23 nt, synthetic construct
  source 1..23: mol_type = other RNA
tttggagtgaagagaccaagatg

SEQ ID NO: 8326 - RNA, 23 nt, synthetic construct
  source 1..23: mol_type = other RNA
ttggagtgaagagaccaagatga

SEQ ID NO: 8327 - RNA, 23 nt, synthetic construct
  source 1..23: mol_type = other RNA
tggagtgaagagaccaagatgaa

SEQ ID NO: 8328 - RNA, 23 nt, synthetic construct
  source 1..23: mol_type = other RNA
agtgaagagaccaagatgaagtt

SEQ ID NO: 8329 - RNA, 23 nt, synthetic construct
  source 1..23: mol_type = other RNA
tgaagagaccaagatgaagtttc

SEQ ID NO: 8330 - RNA, 23 nt, synthetic construct
  source 1..23: mol_type = other RNA
gaagagaccaagatgaagtttcc

SEQ ID NO: 8331 - RNA, 23 nt, synthetic construct
  source 1..23: mol_type = other RNA
aagagaccaagatgaagtttccc

SEQ ID NO: 8332 - RNA, 23 nt, synthetic construct
  source 1..23: mol_type = other RNA
agagaccaagatgaagtttccca

SEQ ID NO: 8333 - RNA, 23 nt, synthetic construct
  source 1..23: mol_type = other RNA
gagaccaagatgaagtttcccag

SEQ ID NO: 8334 - RNA, 23 nt, synthetic construct
  source 1..23: mol_type = other RNA
agaccaagatgaagtttcccagg

SEQ ID NO: 8335 - RNA, 23 nt, synthetic construct
  source 1..23: mol_type = other RNA
gaccaagatgaagtttcccaggc

SEQ ID NO: 8336 - RNA, 23 nt, synthetic construct
  source 1..23: mol_type = other RNA
accaagatgaagtttcccaggca

SEQ ID NO: 8337 - RNA, 23 nt, synthetic construct
  source 1..23: mol_type = other RNA
ccaagatgaagtttcccaggcac

SEQ ID NO: 8338 - RNA, 23 nt, synthetic construct
  source 1..23: mol_type = other RNA
caagatgaagtttcccaggcaca

SEQ ID NO: 8339 - RNA, 23 nt, synthetic construct
  source 1..23: mol_type = other RNA
aagatgaagtttcccaggcacag

SEQ ID NO: 8340 - RNA, 23 nt, synthetic construct
  source 1..23: mol_type = other RNA
agatgaagtttcccaggcacagg

SEQ ID NO: 8341 - RNA, 23 nt, synthetic construct
  source 1..23: mol_type = other RNA
atgaagtttcccaggcacagggc

SEQ ID NO: 8342 - RNA, 23 nt, synthetic construct
  source 1..23: mol_type = other RNA
tgaagtttcccaggcacagggca

SEQ ID NO: 8343 - RNA, 23 nt, synthetic construct
  source 1..23: mol_type = other RNA
aagtttcccaggcacagggcatc

SEQ ID NO: 8344 - RNA, 23 nt, synthetic construct
  source 1..23: mol_type = other RNA
agtttcccaggcacagggcatct

SEQ ID NO: 8345 - RNA, 23 nt, synthetic construct
  source 1..23: mol_type = other RNA
gtttcccaggcacagggcatctg

SEQ ID NO: 8346 - RNA, 23 nt, synthetic construct
  source 1..23: mol_type = other RNA
tttcccaggcacagggcatctgt

SEQ ID NO: 8347 - RNA, 23 nt, synthetic construct
  source 1..23: mol_type = other RNA
cccaacccaacaaccacctggca

SEQ ID NO: 8348 - RNA, 23 nt, synthetic construct
  source 1..23: mol_type = other RNA
ccaacccaacaaccacctggcaa

SEQ ID NO: 8349 - RNA, 23 nt, synthetic construct
  source 1..23: mol_type = other RNA
caacccaacaaccacctggcaat

SEQ ID NO: 8350 - RNA, 23 nt, synthetic construct
  source 1..23: mol_type = other RNA
aacccaacaaccacctggcaata

SEQ ID NO: 8351 - RNA, 23 nt, synthetic construct
  source 1..23: mol_type = other RNA
acccaacaaccacctggcaatat

SEQ ID NO: 8352 - RNA, 23 nt, synthetic construct
  source 1..23: mol_type = other RNA
cccaacaaccacctggcaatatg

SEQ ID NO: 8353 - RNA, 23 nt, synthetic construct
  source 1..23: mol_type = other RNA
ccaacaaccacctggcaatatga

SEQ ID NO: 8354 - RNA, 23 nt, synthetic construct
  source 1..23: mol_type = other RNA
caacaaccacctggcaatatgac

SEQ ID NO: 8355 - RNA, 23 nt, synthetic construct
  source 1..23: mol_type = other RNA
aacaaccacctggcaatatgact

SEQ ID NO: 8356 - RNA, 23 nt, synthetic construct
  source 1..23: mol_type = other RNA
acaaccacctggcaatatgactc

SEQ ID NO: 8357 - RNA, 23 nt, synthetic construct
  source 1..23: mol_type = other RNA
caaccacctggcaatatgactca

SEQ ID NO: 8358 - RNA, 23 nt, synthetic construct
  source 1..23: mol_type = other RNA
aaccacctggcaatatgactcac

SEQ ID NO: 8359 - RNA, 23 nt, synthetic construct
  source 1..23: mol_type = other RNA
accacctggcaatatgactcact

SEQ ID NO: 8360 - RNA, 23 nt, synthetic construct
  source 1..23: mol_type = other RNA
ccacctggcaatatgactcactt

SEQ ID NO: 8361 - RNA, 23 nt, synthetic construct
  source 1..23: mol_type = other RNA
cacctggcaatatgactcacttg

SEQ ID NO: 8362 - RNA, 23 nt, synthetic construct
  source 1..23: mol_type = other RNA
acctggcaatatgactcacttga

SEQ ID NO: 8363 - RNA, 23 nt, synthetic construct
  source 1..23: mol_type = other RNA
cctggcaatatgactcacttgac

SEQ ID NO: 8364 - RNA, 23 nt, synthetic construct
  source 1..23: mol_type = other RNA
ctggcaatatgactcacttgacc

SEQ ID NO: 8365 - RNA, 23 nt, synthetic construct
  source 1..23: mol_type = other RNA
tggcaatatgactcacttgaccc

SEQ ID NO: 8366 - RNA, 23 nt, synthetic construct
  source 1..23: mol_type = other RNA
tgggacccaaatgggcactttct

SEQ ID NO: 8367 - RNA, 23 nt, synthetic construct
  source 1..23: mol_type = other RNA
ggacccaaatgggcactttcttg

SEQ ID NO: 8368 - RNA, 23 nt, synthetic construct
  source 1..23: mol_type = other RNA
gacccaaatgggcactttcttgt

SEQ ID NO: 8369 - RNA, 23 nt, synthetic construct
  source 1..23: mol_type = other RNA
acccaaatgggcactttcttgtc

SEQ ID NO: 8370 - RNA, 23 nt, synthetic construct
  source 1..23: mol_type = other RNA
cccaaatgggcactttcttgtct

SEQ ID NO: 8371 - RNA, 23 nt, synthetic construct
  source 1..23: mol_type = other RNA
ccaaatgggcactttcttgtctg

SEQ ID NO: 8372 - RNA, 23 nt, synthetic construct
  source 1..23: mol_type = other RNA
caaatgggcactttcttgtctga

SEQ ID NO: 8373 - RNA, 23 nt, synthetic construct
  source 1..23: mol_type = other RNA
aaatgggcactttcttgtctgag

SEQ ID NO: 8374 - RNA, 23 nt, synthetic construct
  source 1..23: mol_type = other RNA
aatgggcactttcttgtctgaga

SEQ ID NO: 8375 - RNA, 23 nt, synthetic construct
  source 1..23: mol_type = other RNA
atgggcactttcttgtctgagac

SEQ ID NO: 8376 - RNA, 23 nt, synthetic construct
  source 1..23: mol_type = other RNA
tgggcactttcttgtctgagact

SEQ ID NO: 8377 - RNA, 23 nt, synthetic construct
  source 1..23: mol_type = other RNA
gggcactttcttgtctgagactc

SEQ ID NO: 8378 - RNA, 23 nt, synthetic construct
  source 1..23: mol_type = other RNA
ggcactttcttgtctgagactct

SEQ ID NO: 8379 - RNA, 23 nt, synthetic construct
  source 1..23: mol_type = other RNA
gcactttcttgtctgagactctg

SEQ ID NO: 8380 - RNA, 23 nt, synthetic construct
  source 1..23: mol_type = other RNA
cactttcttgtctgagactctgg

SEQ ID NO: 8381 - RNA, 23 nt, synthetic construct
  source 1..23: mol_type = other RNA
actttcttgtctgagactctggc

SEQ ID NO: 8382 - RNA, 23 nt, synthetic construct
  source 1..23: mol_type = other RNA
ctttcttgtctgagactctggct

SEQ ID NO: 8383 - RNA, 23 nt, synthetic construct
  source 1..23: mol_type = other RNA
tttcttgtctgagactctggctt

SEQ ID NO: 8384 - RNA, 23 nt, synthetic construct
  source 1..23: mol_type = other RNA
ttcttgtctgagactctggctta

SEQ ID NO: 8385 - RNA, 23 nt, synthetic construct
  source 1..23: mol_type = other RNA
cttattccaggttggctgatgtg

SEQ ID NO: 8386 - RNA, 23 nt, synthetic construct
  source 1..23: mol_type = other RNA
ttattccaggttggctgatgtgt

SEQ ID NO: 8387 - RNA, 23 nt, synthetic construct
  source 1..23: mol_type = other RNA
tattccaggttggctgatgtgtt

SEQ ID NO: 8388 - RNA, 23 nt, synthetic construct
  source 1..23: mol_type = other RNA
attccaggttggctgatgtgttg

SEQ ID NO: 8389 - RNA, 23 nt, synthetic construct
  source 1..23: mol_type = other RNA
ttccaggttggctgatgtgttgg

SEQ ID NO: 8390 - RNA, 23 nt, synthetic construct
  source 1..23: mol_type = other RNA
tccaggttggctgatgtgttggg

SEQ ID NO: 8391 - RNA, 23 nt, synthetic construct
  source 1..23: mol_type = other RNA
atgatttcctgccctaagtcctg

SEQ ID NO: 8392 - RNA, 23 nt, synthetic construct
  source 1..23: mol_type = other RNA
gatttcctgccctaagtcctgtg

SEQ ID NO: 8393 - RNA, 23 nt, synthetic construct
  source 1..23: mol_type = other RNA
tgagaagatgtcagggactaggg

SEQ ID NO: 8394 - RNA, 23 nt, synthetic construct
  source 1..23: mol_type = other RNA
gagaagatgtcagggactaggga

SEQ ID NO: 8395 - RNA, 23 nt, synthetic construct
  source 1..23: mol_type = other RNA
agaagatgtcagggactagggag

SEQ ID NO: 8396 - RNA, 23 nt, synthetic construct
  source 1..23: mol_type = other RNA
gaagatgtcagggactagggagg

SEQ ID NO: 8397 - RNA, 23 nt, synthetic construct
  source 1..23: mol_type = other RNA
aagatgtcagggactagggaggg

SEQ ID NO: 8398 - RNA, 23 nt, synthetic construct
  source 1..23: mol_type = other RNA
agatgtcagggactagggaggga

SEQ ID NO: 8399 - RNA, 23 nt, synthetic construct
  source 1..23: mol_type = other RNA
gggaggaggaagcagatagatgg

SEQ ID NO: 8400 - RNA, 23 nt, synthetic construct
  source 1..23: mol_type = other RNA
ggaggaggaagcagatagatggt

SEQ ID NO: 8401 - RNA, 23 nt, synthetic construct
  source 1..23: mol_type = other RNA
gaggaggaagcagatagatggtc

SEQ ID NO: 8402 - RNA, 23 nt, synthetic construct
  source 1..23: mol_type = other RNA
aggaggaagcagatagatggtcc

SEQ ID NO: 8403 - RNA, 23 nt, synthetic construct
  source 1..23: mol_type = other RNA
ggaggaagcagatagatggtcca

SEQ ID NO: 8404 - RNA, 23 nt, synthetic construct
  source 1..23: mol_type = other RNA
gaggaagcagatagatggtccag

SEQ ID NO: 8405 - RNA, 23 nt, synthetic construct
  source 1..23: mol_type = other RNA
aggaagcagatagatggtccagc

SEQ ID NO: 8406 - RNA, 23 nt, synthetic construct
  source 1..23: mol_type = other RNA
ggaagcagatagatggtccagca

SEQ ID NO: 8407 - RNA, 23 nt, synthetic construct
  source 1..23: mol_type = other RNA
gaagcagatagatggtccagcag

SEQ ID NO: 8408 - RNA, 23 nt, synthetic construct
  source 1..23: mol_type = other RNA
aagcagatagatggtccagcagg

SEQ ID NO: 8409 - RNA, 23 nt, synthetic construct
  source 1..23: mol_type = other RNA
agcagatagatggtccagcaggc

SEQ ID NO: 8410 - RNA, 23 nt, synthetic construct
  source 1..23: mol_type = other RNA
gcagatagatggtccagcaggct

SEQ ID NO: 8411 - RNA, 23 nt, synthetic construct
  source 1..23: mol_type = other RNA
cagatagatggtccagcaggctt

SEQ ID NO: 8412 - RNA, 23 nt, synthetic construct
  source 1..23: mol_type = other RNA
agatagatggtccagcaggcttg

SEQ ID NO: 8413 - RNA, 23 nt, synthetic construct
  source 1..23: mol_type = other RNA
gatagatggtccagcaggcttga

SEQ ID NO: 8414 - RNA, 23 nt, synthetic construct
  source 1..23: mol_type = other RNA
atagatggtccagcaggcttgaa

SEQ ID NO: 8415 - RNA, 23 nt, synthetic construct
  source 1..23: mol_type = other RNA
tagatggtccagcaggcttgaag

SEQ ID NO: 8416 - RNA, 23 nt, synthetic construct
  source 1..23: mol_type = other RNA
agatggtccagcaggcttgaagc

SEQ ID NO: 8417 - RNA, 23 nt, synthetic construct
  source 1..23: mol_type = other RNA
gatggtccagcaggcttgaagca

SEQ ID NO: 8418 - RNA, 23 nt, synthetic construct
  source 1..23: mol_type = other RNA
atggtccagcaggcttgaagcag

SEQ ID NO: 8419 - RNA, 23 nt, synthetic construct
  source 1..23: mol_type = other RNA
tggtccagcaggcttgaagcagg

SEQ ID NO: 8420 - RNA, 23 nt, synthetic construct
  source 1..23: mol_type = other RNA
ggaaggtcaagagggagatgggc

SEQ ID NO: 8421 - RNA, 23 nt, synthetic construct
  source 1..23: mol_type = other RNA
gaaggtcaagagggagatgggca

SEQ ID NO: 8422 - RNA, 23 nt, synthetic construct
  source 1..23: mol_type = other RNA
aaggtcaagagggagatgggcaa

SEQ ID NO: 8423 - RNA, 23 nt, synthetic construct
  source 1..23: mol_type = other RNA
aggtcaagagggagatgggcaag

SEQ ID NO: 8424 - RNA, 23 nt, synthetic construct
  source 1..23: mol_type = other RNA
ggtcaagagggagatgggcaagg

SEQ ID NO: 8425 - RNA, 23 nt, synthetic construct
  source 1..23: mol_type = other RNA
aggcgctgagggaggatgcttag

SEQ ID NO: 8426 - RNA, 23 nt, synthetic construct
  source 1..23: mol_type = other RNA
ggcgctgagggaggatgcttagg

SEQ ID NO: 8427 - RNA, 23 nt, synthetic construct
  source 1..23: mol_type = other RNA
aggcactaagcctaagaagttcc

SEQ ID NO: 8428 - RNA, 23 nt, synthetic construct
  source 1..23: mol_type = other RNA
ggcactaagcctaagaagttccc

SEQ ID NO: 8429 - RNA, 23 nt, synthetic construct
  source 1..23: mol_type = other RNA
ggacaggacccactgggagacaa

SEQ ID NO: 8430 - RNA, 23 nt, synthetic construct
  source 1..23: mol_type = other RNA
gacaggacccactgggagacaag

SEQ ID NO: 8431 - RNA, 23 nt, synthetic construct
  source 1..23: mol_type = other RNA
acaggacccactgggagacaagc

SEQ ID NO: 8432 - RNA, 23 nt, synthetic construct
  source 1..23: mol_type = other RNA
caggacccactgggagacaagca

SEQ ID NO: 8433 - RNA, 23 nt, synthetic construct
  source 1..23: mol_type = other RNA
aggacccactgggagacaagcat

SEQ ID NO: 8434 - RNA, 23 nt, synthetic construct
  source 1..23: mol_type = other RNA
ggacccactgggagacaagcatt

SEQ ID NO: 8435 - RNA, 23 nt, synthetic construct
  source 1..23: mol_type = other RNA
gacccactgggagacaagcattt

SEQ ID NO: 8436 - RNA, 23 nt, synthetic construct
  source 1..23: mol_type = other RNA
acccactgggagacaagcattta

SEQ ID NO: 8437 - RNA, 23 nt, synthetic construct
  source 1..23: mol_type = other RNA
cccactgggagacaagcatttat

SEQ ID NO: 8438 - RNA, 23 nt, synthetic construct
  source 1..23: mol_type = other RNA
ccactgggagacaagcatttata

SEQ ID NO: 8439 - RNA, 23 nt, synthetic construct
  source 1..23: mol_type = other RNA
cactgggagacaagcatttatac

SEQ ID NO: 8440 - RNA, 23 nt, synthetic construct
  source 1..23: mol_type = other RNA
actgggagacaagcatttatact

SEQ ID NO: 8441 - RNA, 23 nt, synthetic construct
  source 1..23: mol_type = other RNA
tgggagacaagcatttatacttt

SEQ ID NO: 8442 - RNA, 23 nt, synthetic construct
  source 1..23: mol_type = other RNA
gggagacaagcatttatactttc

SEQ ID NO: 8443 - RNA, 23 nt, synthetic construct
  source 1..23: mol_type = other RNA
ggagacaagcatttatactttct

SEQ ID NO: 8444 - RNA, 23 nt, synthetic construct
  source 1..23: mol_type = other RNA
gagacaagcatttatactttctt

SEQ ID NO: 8445 - RNA, 23 nt, synthetic construct
  source 1..23: mol_type = other RNA
agacaagcatttatactttcttt

SEQ ID NO: 8446 - RNA, 23 nt, synthetic construct
  source 1..23: mol_type = other RNA
gacaagcatttatactttctttc

SEQ ID NO: 8447 - RNA, 23 nt, synthetic construct
  source 1..23: mol_type = other RNA
tttcagccttcctgagtcccagg

SEQ ID NO: 8448 - RNA, 23 nt, synthetic construct
  source 1..23: mol_type = other RNA
tctgaccagtcgtcccagaataa

SEQ ID NO: 8449 - RNA, 23 nt, synthetic construct
  source 1..23: mol_type = other RNA
tttggctgagcaccacatcacca

SEQ ID NO: 8450 - RNA, 23 nt, synthetic construct
  source 1..23: mol_type = other RNA
ttggctgagcaccacatcaccaa

SEQ ID NO: 8451 - RNA, 23 nt, synthetic construct
  source 1..23: mol_type = other RNA
catcaccaacctgggctggcatg

SEQ ID NO: 8452 - RNA, 23 nt, synthetic construct
  source 1..23: mol_type = other RNA
acaacagcacagttactggacaa

SEQ ID NO: 8453 - RNA, 23 nt, synthetic construct
  source 1..23: mol_type = other RNA
ctggacacagcaggacaccagca

SEQ ID NO: 8454 - RNA, 23 nt, synthetic construct
  source 1..23: mol_type = other RNA
ttcttgtctgagactctggcttg

SEQ ID NO: 8455 - RNA, 23 nt, synthetic construct
  source 1..23: mol_type = other RNA
agggtcaagagggagatgggcaa
